(19) United States
(12) Patent Application Publication
(10) Pub. No.: US 2003/0219382 A1
(43) Pub. Date: Nov. 27, 2003

(54) Cancer-linked gene as target for chemotherapy

(76) Inventors: Paul E. Young, Gaithersburg, MD (US); Reinhard Ebner, Gaithersburg, MD (US); Zoe Weaver, New Market, MD (US)

Correspondence Address: CARELLA, BYRNE, BAIN, GILFILLAN,, CECCHI, STEWART & OLSTEIN, 6 Becker Farm Road, Roseland, NJ, 07068, US

(21) Appl. No.: 10/379,632

(22) Filed: Mar. 5, 2003

Related U.S. Application Data
(60) Provisional application No. 60/362,021, filed on Mar. 6, 2002.

(51) Int. Cl. C12Q 1/68; A61K 49/00; A61K 39/395; A61K 39/40; C07K 14/415; C07K 14/705; C07K 16/46

(52) U.S. Cl. 424/9.2; 435/6; 424/141.1; 424/178.1; 530/350; 530/391.1; 530/388.1; 530/370

(57) ABSTRACT

Cancer-linked gene sequences, and derived amino acid sequences, are disclosed along with processes for assaying potential antitumor agents based on their modulation of the expression of these cancer-linked genes. Also disclosed are antibodies that react with the disclosed polypeptides and methods of using the antibodies to treat cancerous conditions, such as by using the antibody to target cancerous cells in vivo for purposes of delivering therapeutic agents thereto. Also described are methods of diagnosis using the gene sequences.

[0001] This application claims priority of U.S. Provisional Application Serial No. 60/362,021, filed Mar. 6, 2002, the disclosure of which is hereby incorporated by reference in its entirety.

### FIELD OF THE INVENTION

[0002] The present invention relates to methods of screening cancer-linked genes and expression products for involvement in the cancer initiation and facilitation process as a means of cancer diagnosis as well as screening potential anti-cancer agents, and includes antibodies against expression products of said genes and immuno-conjugates containing such antibodies.

### BACKGROUND OF THE INVENTION

[0003] Cancer-linked genes are valuable in that they indicate genetic differences between cancer cells and normal cells, such as where a gene is expressed in a cancer cell but not in a non-cancer cell, or where said gene is over-expressed or expressed at a higher level in a cancer as opposed to normal or non-cancer cell. In addition, the expression of such a gene in a normal cell but not in a cancer cell, especially of the same type of tissue, can indicate important functions in the cancerous process. For example, screening assays for novel drugs are based on the response of model cell based systems in vitro to treatment with specific compounds. Such genes are also useful in the diagnosis of cancer and the identification of a cell as cancerous. Gene activity is readily measured by measuring the rate of production of gene products, such as RNAs and polypeptides encoded by such genes. Where genes encode cell surface proteins, appearance of, or alterations in, such proteins, as cell surface markers, are an indication of neoplastic activity. Some such screens rely on specific genes, such as oncogenes (or gene mutations). In accordance with the present invention, a cancer-linked gene has been identified and its putative amino acid sequence worked out. Such gene is useful in the diagnosing of cancer, the screening of anticancer agents and the treatment of cancer using such agents, especially in that these genes encode polypeptides that can act as markers, such as cell surface markers, thereby providing ready targets for anti-tumor agents such as antibodies, preferably antibodies complexed to cytotoxic agents, including apoptotic agents.

### BRIEF SUMMARY OF THE INVENTION

[0004] In accordance with the present invention, there is provided herein a cancer specific gene, linked especially to breast cancer, or otherwise involved in the cancer initiating and facilitating process and the derived amino acid sequence thereof, including a number of different transcripts derived from said gene.

[0005] In one aspect, the present invention relates to a process for identifying an agent that modulates the activity of a cancer-related gene comprising:

[0006] (a) contacting a compound with a cell containing a gene that corresponds to a polynucleotide having a sequence selected from the group consisting of the polynucleotide sequences of SEQ ID NO: 1-81 and under conditions promoting the expression of said gene; and

[0007] (b) detecting a difference in expression of said gene relative to when said compound is not present

[0008] thereby identifying an agent that modulates the activity of a cancer-related gene.

[0009] In various embodiments of such a process, the cell is a cancer cell and the difference in expression is a decrease in expression. Such polynucleotides may also include those that have sequences identical to polynucleotide sequences of SEQ ID NO: 1-81.

[0010] In another aspect, the present invention relates to a process for identifying an anti-neoplastic agent comprising contacting a cell exhibiting neoplastic activity with a compound first identified as a cancer related gene modulator using an assay process disclosed herein and detecting a decrease in said neoplastic activity after said contacting compared to when said contacting does not occur. Such neoplastic activity may include accelerated cellular replication and/or metastasis, and the decrease in neoplastic activity preferably results from the death of the cell, or senescence, terminal differentiation or growth inhibition.

[0011] The present invention also relates to a process for identifying an anti-neoplastic agent comprising administering to an animal exhibiting a cancer condition an effective amount of an agent first identified according to a process of one of one of the assays disclosed according to the invention and detecting a decrease in said cancerous condition.

[0012] The present invention further relates to a process for determining the cancerous status of a cell, comprising determining an increase in the level of expression in said cell of at least one gene that corresponds to a polynucleotide having a sequence selected from the group consisting of polynucleotide sequences of SEQ ID NO: 1-81 wherein an elevated expression relative to a known non-cancerous cell indicates a cancerous state or potentially cancerous state. Such elevated expression may be due to an increased copy number.

[0013] The present invention additionally relates to an isolated polypeptide, encoded by one of the polynucleotide transcripts disclosed herein, comprising an amino acid sequence homologous to an amino acid selected from the group consisting of polypeptide sequences of SEQ ID NO: 82-109 wherein any difference between said amino acid sequence and the sequence of polypeptide sequences of SEQ ID NO: 82-109 is due solely to conservative amino acid substitutions and wherein said isolated polypeptide comprises at least one immunogenic fragment. In a preferred embodiment, the present invention encompasses an isolated polypeptide comprising an amino acid sequence homologous to an amino acid selected from the group consisting of polypeptide sequences of SEQ ID NO: 82-109.

[0014] The present invention also relates to an antibody that reacts with and/or binds to and/or is specific for a polypeptide as disclosed herein, preferably a polypeptide comprising an amino acid sequence selected from the group consisting of polypeptide sequences of SEQ ID NO: 82-109. Such an antibody may be polyclonal, monoclonal, recombinant or synthetic in origin.

[0015] In one such embodiment, said antibody is associated, either covalently or non-covalently, with a cytotoxic agent, for example, an apoptotic agent. Thus, the present invention relates to an immuno-conjugate comprising an antibody of the invention and a cytotoxic agent. In a preferred embodiment, the cytotoxic agent is a calicheamicin, a maytansinoid, an adozelesin, DC1, a cytotoxic protein, a taxol, a taxotere, or a taxoid. In especially preferred embodiments, the calicheamicin is calicheamicin γ₁^{I}, N-acetyl gamma calicheamicin dimethyl hydrazide or calicheamicin θ₁^{I}, the maytansinoid is DM1, the cytotoxic protein is ricin, abrin, gelonin, pseudomonas exotoxin or diphtheria toxin, the taxol is paclitaxel, and the taxotere is docetaxel.

[0016] The present invention also relates to a process for treating cancer comprising contacting a cancerous cell with an agent having activity against an expression product encoded by a gene sequence selected from the group consisting of polynucleotide sequences of SEQ ID NO: 1-81. In one such embodiment, the cancerous cell is contacted in vivo. In another such embodiment, said agent has affinity for said expression product. In a preferred embodiment, such agent is an antibody disclosed herein, such as an antibody that is specific or selective for, or otherwise reacts with, or binds to, a polypeptide of the invention. In a preferred embodiment, the expression product is a polypeptide incorporating an amino acid sequence selected from polypeptide sequences of SEQ ID NO: 82-109.

[0017] The present invention further encompasses an immunogenic composition comprising a polypeptide disclosed herein, as well as compositions formed using antibodies specific for these polypeptides.

[0018] The present invention is also directed to uses of such compositions. Such uses include a method for treating cancer in an animal afflicted therewith comprising administering to said animal an amount of an immunogenic composition of one or more of the polypeptides disclosed herein where such amount is an amount sufficient to elicit the production of cytotoxic T lymphocytes specific for a polypeptide of the invention, preferably a polypeptide incorporating a sequence of polypeptide sequences of SEQ ID NO: 82-109. In a preferred embodiment, the animal to be so treated is a human patient.

[0019] The present invention presents assays for identifying agents, including small organic compounds, having anti-neoplastic activity and thereby also affords a process for treating a cancerous condition in an animal afflicted therewith comprising administering to said animal a therapeutically effective amount of such an agent, preferably one first identified as having anti-neoplastic activity using an assay process of the invention and subsequently administering said agent to a test animal to confirm such activity. Such agents may likewise be used to protect an animal, such as a human patient at risk of developing cancer, from developing such a disease.

### DEFINITIONS

[0020] As used herein, the terms “portion,” “segment,” and “fragment,” when used in relation to polypeptides, refer to a continuous sequence of residues, such as amino acid residues, which sequence forms a subset of a larger sequence. For example, if a polypeptide were subjected to treatment with any of the common endopeptidases, such as trypsin or chymotrypsin, the oligopeptides resulting from such treatment would represent portions, segments or fragments of the starting polypeptide. When used in relation to a polynucleotides, such terms refer to the products produced by treatment of said polynucleotides with any of the common endonucleases.

[0021] As used herein, the term “isolated” means that the material is removed from its original environment (e.g., the natural environment if it is naturally occurring). It could also be produced recombinantly and subsequently purified. For example, a naturally-occurring polynucleotide or polypeptide present in a living animal is not isolated, but the same polynucleotide or polypeptide, separated from some or all of the coexisting materials in the natural system, is isolated. Such polynucleotides, for example, those prepared recombinantly, could be part of a vector and/or such polynucleotides or polypeptides could be part of a composition, and still be isolated in that such vector or composition is not part of its natural environment. In one embodiment of the present invention, such isolated, or purified, polypeptide is useful in generating antibodies for practicing the invention, or where said antibody is attached to a cytotoxic or cytolytic agent, such as an apoptotic agent.

[0022] The term “percent identity” or “percent identical,” when referring to a sequence, means that a sequence is compared to a claimed or described sequence after alignment of the sequence to be compared (the “Compared Sequence”) with the described or claimed sequence (the “Reference Sequence”). The Percent Identity is then determined according to the following formula:

Percent Identity=100 [1−(C/R)]

[0023] wherein C is the number of differences between the Reference Sequence and the Compared Sequence over the length of alignment between the Reference Sequence and the Compared Sequence wherein (i) each base or amino acid in the Reference Sequence that does not have a corresponding aligned base or amino acid in the Compared Sequence and (ii) each gap in the Reference Sequence and (iii) each aligned base or amino acid in the Reference Sequence that is different from an aligned base or amino acid in the Compared Sequence, constitutes a difference; and R is the number of bases or amino acids in the Reference Sequence over the length of the alignment with the Compared Sequence with any gap created in the Reference Sequence also being counted as a base or amino acid.

[0024] If an alignment exists between the Compared Sequence and the Reference Sequence for which the percent identity as calculated above is about equal to or greater than a specified minimum Percent Identity then the Compared Sequence has the specified minimum percent identity to the Reference Sequence even though alignments may exist in which the hereinabove calculated Percent Identity is less than the specified Percent Identity.

[0025] As known in the art “similarity” between two polypeptides is determined by comparing the amino acid sequence and its conserved amino acid substitutes of one polypeptide to the sequence of a second polypeptide.

[0026] In accordance with the present invention, the term “DNA segment” or “DNA sequence” refers to a DNA polymer, in the form of a separate fragment or as a component of a larger DNA construct, which has been derived from DNA isolated at least once in substantially pure form, i.e., free of contaminating endogenous materials and in a quantity or concentration enabling identification, manipulation, and recovery of the segment and its component nucleotide sequences by standard biochemical methods, for example, using a cloning vector. Such segments are provided in the form of an open reading frame uninterrupted by internal non-translated sequences, or introns, which are typically present in eukaryotic genes. Sequences of non-translated DNA may be present downstream from the open reading frame, where the same do not interfere with manipulation or expression of the coding regions.

[0027] The term “coding region” refers to that portion of a gene which either naturally or normally codes for the expression product of that gene in its natural genomic environment, i.e., the region coding in vivo for the native expression product of the gene. The coding region can be from a normal, mutated or altered gene, or can even be from a DNA sequence, or gene, wholly synthesized in the laboratory using methods well known to those of skill in the art of DNA synthesis.

[0028] In accordance with the present invention, the term “nucleotide sequence” refers to a heteropolymer of deoxyribonucleotides. Generally, DNA segments encoding the proteins provided by this invention are assembled from cDNA fragments and short oligonucleotide linkers, or from a series of oligonucleotides, to provide a synthetic gene which is capable of being expressed in a recombinant transcriptional unit comprising regulatory elements derived from a microbial, eukaryotic or viral operon.

[0029] The term “expression product” means that polypeptide or protein that is the natural translation product of the gene and any nucleic acid sequence coding equivalents resulting from genetic code degeneracy and thus coding for the same amino acid(s).

[0030] The term “active fragment,” when referring to a coding sequence, means a portion comprising less than the complete coding region whose expression product retains essentially the same biological function or activity as the expression product of the complete coding region.

[0031] The term “primer” means a short nucleic acid sequence that is paired with one strand of DNA and provides a free 3′-OH end at which a DNA polymerase starts synthesis of a deoxyribonucleotide chain.

[0032] The term “promoter” means a region of DNA involved in binding of RNA polymerase to initiate transcription. The term “enhancer” refers to a region of DNA that, when present and active, has the effect of increasing expression of a different DNA sequence that is being expressed, thereby increasing the amount of expression product formed from said different DNA sequence.

[0033] The term “open reading frame (ORF)” means a series of triplets coding for amino acids without any termination codons and is a sequence (potentially) translatable into protein.

[0034] As used herein, reference to a “DNA sequence” includes both single stranded and double stranded DNA. Thus, the specific sequence, unless the context indicates otherwise, refers to the single strand DNA of such sequence, the duplex of such sequence with its complement (double stranded DNA) and the complement of such sequence.

[0035] As used herein, “corresponding genes” refers to genes that encode an RNA that is at least 90% identical, preferably at least 95% identical, most preferably at least 98% identical, and especially identical, to an RNA encoded by one of the nucleotide sequences disclosed herein (i.e., polynucleotide sequences of SEQ ID NO: 1-81). Such genes will also encode the same polypeptide sequence as any of the sequences disclosed herein, preferably polynucleotide sequences of SEQ ID NO: 1-81, but may include differences in such amino acid sequences where such differences are limited to conservative amino acid substitutions, such as where the same overall three dimensional structure, and thus the same antigenic character, is maintained. Thus, amino acid sequences may be within the scope of the present invention where they react with the same antibodies that react with polypeptides comprising the sequences of polypeptide sequences of SEQ ID NO: 82-109. A “corresponding gene” includes splice variants thereof.

[0036] The genes identified by the present disclosure are considered “cancer-related” genes, as this term is used herein, and include genes expressed at higher levels (due, for example, to elevated rates of expression, elevated extent of expression or increased copy number) in cancer cells relative to expression of these genes in normal (i.e., non-cancerous) cells where said cancerous state or status of test cells or tissues has been determined by methods known in the art, such as by reverse transcriptase polymerase chain reaction (RT-PCR) as described in the Examples herein. In specific embodiments, this relates to the genes whose sequences correspond to the polynucleotide sequences of SEQ ID NO: 1-81.

[0037] As used herein, the term “conservative amino acid substitutions” are defined herein as exchanges within one of the following five groups:

[0038] I. Small aliphatic, nonpolar or slightly polar residues:

[0039] Ala, Ser, Thr, Pro, Gly;

[0040] II. Polar, negatively charged residues and their amides:

[0041] Asp, Asn, Glu, Gln;

[0042] III. Polar, positively charged residues:

[0043] His, Arg, Lys;

[0044] IV. Large, aliphatic, nonpolar residues:

[0045] Met Leu, IIe, Val, Cys

[0046] V. Large, aromatic residues:

[0047] Phe, Tyr, Trp

### DETAILED SUMMARY OF THE INVENTION

[0048] The present invention relates to processes for utilizing a nucleotide sequence for a cancer-linked gene, polypeptides encoded by such sequences and antibodies reactive with such polypeptides in methods of treating and diagnosing cancer, preferably breast cancer, and in carrying out screening assays for agents effective in reducing the activity of cancer-linked genes and thereby treating a cancerous condition.

[0049] The polypeptides disclosed herein incorporate various polynucleotide transcripts (polynucleotide sequences of SEQ ID NO: 1-81) and the derived amino acid sequence (polypeptide sequences of SEQ ID NO: 82-109) from said transcripts are available as targets for chemotherapeutic agents, especially anti-cancer agents, including antibodies specific for said polypeptides.

[0050] The cancer-related polynucleotide sequences disclosed herein correspond to gene sequences whose expression is indicative of the cancerous status of a given cell. Such sequences are substantially identical to polynucleotide sequences of SEQ ID NO: 1-81, which represent different transcripts identified from the GenBank EST database and which exhibit cancer-specific expression. The polynucleotides of the invention are those that correspond to a sequence of polynucleotide sequences of SEQ ID NO: 1-81. Such sequences have been searched within the GenBank database, especially the EST database, wherein the nucleotide sequences and derived polypeptides have the characteristics and sequences shown in SEQ ID NO: 82-109.

[0051] The nucleotides and polypeptides, as gene products, used in the processes of the present invention may comprise a recombinant polynucleotide or polypeptide, a natural polynucleotide or polypeptide, or a synthetic polynucleotide or polypeptide, or a recombinant polynucleotide or polypeptide.

[0052] Fragments of such polynucleotides and polypeptides as are disclosed herein may also be useful in practicing the processes of the present invention. For example, a fragment, derivative or analog of the polypeptide (polypeptide sequences of SEQ ID NO: 82-109) may be (i) one in which one or more of the amino acid residues are substituted with a conserved or non-conserved amino acid residue (preferably a conserved amino acid residue) and such substituted amino acid residue may or may not be one encoded by the genetic code, or (ii) one in which one or more of the amino acid residues includes a substituent group, or (iii) one in which the mature polypeptide is fused with another compound, such as a compound to increase the half-life of the polypeptide (for example, polyethylene glycol), or (iv) one in which the additional amino acids are fused to the mature polypeptide, such as a leader or secretory sequence or a sequence which is employed for purification of the mature polypeptide (such as a histidine hexapeptide) or a proprotein sequence. Such fragments, derivatives and analogs are deemed to be within the scope of those skilled in the art from the teachings herein.

[0053] In another aspect, the present invention relates to an isolated polypeptide, including a purified polypeptide, comprising an amino acid sequence at least 90% identical to the amino acid sequence of polypeptide sequences of SEQ ID NO: 82-109. In preferred embodiments, said isolated polypeptide comprises an amino acid sequence having sequence identity of at least 95%, preferably at least about 98%, and especially is identical to, the sequence of polypeptide sequences of SEQ ID NO: 82-109. The present invention also includes isolated active fragments of such polypeptides where said fragments retain the biological activity of the polypeptide or where such active fragments are useful as specific targets for cancer treatment, prevention or diagnosis. Thus, the present invention relates to any polypeptides, or fragments thereof, with sufficient sequence homology to the sequences disclosed herein as to be useful in the production of antibodies that react with (i.e., are selective or specific for) the polypeptides of polynucleotide sequences of SEQ ID NO: 1-81 so as to be useful in targeting cells that exhibit such polypeptides, or fragments, on their surfaces, thereby providing targets for such antibodies and therapeutic agents associated with such antibodies.

[0054] The polynucleotides and polypeptides useful in practicing the processes of the present invention may likewise be obtained in an isolated or purified form. In addition, the polypeptide disclosed herein as being useful in practicing the processes of the invention are believed to be surface proteins present on cells, such as cancerous cells. Precisely how such cancer-linked proteins are used in the processes of the invention may thus differ depending on the therapeutic approach used. For example, cell-surface proteins, such as receptors, are desirable targets for cytotoxic antibodies that can be generated against the polypeptides disclosed herein.

[0055] The sequence information disclosed herein, as derived from the GenBank submissions, can readily be utilized by those skilled in the art to prepare the corresponding full-length polypeptide by peptide synthesis. The same is true for either the polynucleotides or polypeptides disclosed herein for use in the methods of the invention.

[0056] The present invention relates to an isolated polypeptide, encoded by one of the polynucleotide transcripts disclosed herein, comprising an amino acid sequence homologous to an amino acid sequence selected from the group consisting of polypeptide sequences of SEQ ID NO: 82-109, wherein any difference between amino acid sequence in the isolated polypeptide and the sequence of polypeptide sequences of SEQ ID NO: 82-109 is due solely to conservative amino acid substitutions and wherein said isolated polypeptide comprises at least one immunogenic fragment. In a preferred embodiment, the present invention encompasses an isolated polypeptide comprising an amino acid sequence selected from the group consisting of polypeptide sequences of SEQ ID NO: 82-109.

[0057] Methods of producing recombinant cells and vectors useful in preparaing the polynucleotides and polypeptides disclosed herein are well known to those skilled in the molecular biology art. See, for example, Sambrook, et al., Molecular Cloning: A Laboratory Manual, Second Edition, Cold Spring Harbor, N.Y., (1989), Wu et al., Methods in Gene Biotechnology (CRC Press, New York, N.Y., 1997), and Recombinant Gene Expression Protocols, in Methods in Molecular Biology, Vol. 62, (Tuan, ed., Humana Press, Totowa, N.J., 1997), the disclosures of which are hereby incorporated by reference.

[0058] In one aspect, the present invention relates to a process for identifying an agent that modulates the activity of a cancer-related gene comprising:

[0059] (a) contacting a compound with a cell containing a gene that corresponds to a polynucleotide having a sequence selected from the group consisting of the polynucleotide sequences of SEQ ID NO: 1-81 and under conditions promoting the expression of said gene; and

[0060] (b) detecting a difference in expression of said gene relative to when said compound is not present

[0061] thereby identifying an agent that modulates the activity of a cancer-related gene.

[0062] In specific embodiments of such process the cell is a cancer cell and the difference in expression is a decrease in expression. Such polynucleotides may also include those that have sequences identical to the polynucleotide sequences of SEQ ID NO: 1-81.

[0063] In another aspect, the present invention relates to a process for identifying an anti-neoplastic agent comprising contacting a cell exhibiting neoplastic activity with a compound first identified as a cancer related gene modulator using an assay process disclosed herein and detecting a decrease in said neoplastic activity after said contacting compared to when said contacting does not occur. Such neoplastic activity may include accelerated cellular replication and/or metastasis, and the decrease in neoplastic activity preferably results from the death of the cell.

[0064] The present invention also relates to a process for identifying an anti-neoplastic agent comprising administering to an animal exhibiting a cancer condition an effective amount of an agent first identified according to a process of one of one of the assays disclosed according to the invention and detecting a decrease in said cancerous condition.

[0065] In specific embodiments of the present invention, the genes useful for the invention comprise genes that correspond to polynucleotides having a sequence selected from polynucleotide sequences of SEQ ID NO: 1-81, or may comprise the sequence of any of the polynucleotides disclosed herein (where the latter are cDNA sequences).

[0066] In accordance with the present invention, such assays rely on methods of determining the activity of the gene in question. Such assays are advantageously based on model cellular systems using cancer cell lines, primary cancer cells, or cancerous tissue samples that are maintained in growth medium and treated with compounds at a single concentration or at a range of concentrations. At specific times after treatment, cellular RNAs are conveniently isolated from the treated cells or tissues, which RNAs are indicative of expression of selected genes. The cellular RNA is then divided and subjected to differential analysis that detects the presence and/or quantity of specific RNA transcripts, which transcripts may then be amplified for detection purposes using standard methodologies, such as, for example, reverse transcriptase polymerase chain reaction (RT-PCR), etc. The presence or absence, or concentration levels, of specific RNA transcripts are determined from these measurements. The polynucleotide sequences disclosed herein are readily used as probes for the detection of such RNA transcripts and thus the measurement of gene activity and expression.

[0067] The polynucleotides of the invention can include fully operational genes with attendant control or regulatory sequences or merely a polynucleotide sequence encoding the corresponding polypeptide or an active fragment or analog thereof.

[0068] Because expression of the polynucleotide sequences disclosed herein are specific to the cancerous state, useful gene modulation is downward modulation, so that, as a result of exposure to an antineoplastic agent identified by the screening assays herein, the corresponding gene of the cancerous cell is expressed at a lower level (or not expressed at all) when exposed to the agent as compared to the expression when not exposed to the agent. For example, the gene sequences disclosed herein (polynucleotide sequences of SEQ ID NO: 1-81) correspond to a gene expressed at a higher level in cells of breast cancer than in normal breast cells. Thus, where said chemical agent causes this gene of the tested cell to be expressed at a lower level than the same genes of the reference, this is indicative of downward modulation and indicates that the chemical agent to be tested has anti-neoplastic activity.

[0069] In carrying out the assays disclosed herein, relative antineoplastic activity may be ascertained by the extent to which a given chemical agent modulates the expression of genes present in a cancerous cell. Thus, a first chemical agent that modulates the expression of a gene associated with the cancerous state (i.e., a gene corresponding to one or more of the polynucleotide transcripts disclosed herein) to a larger degree than a second chemical agent tested by the assays of the invention is thereby deemed to have higher, or more desirable, or more advantageous, anti-neoplastic activity than said second chemical agent.

[0070] The gene expression to be measured is commonly assayed using RNA expression as an indicator. Thus, the greater the level of RNA (for example, messenger RNA or mRNA) detected the higher the level of expression of the corresponding gene. Thus, gene expression, either absolute or relative, is determined by the relative expression of the RNAs encoded by such genes.

[0071] RNA may be isolated from samples in a variety of ways, including lysis and denaturation with a phenolic solution containing a chaotropic agent (e.g., trizol) followed by isopropanol precipitation, ethanol wash, and resuspension in aqueous solution; or lysis and denaturation followed by isolation on solid support, such as a Qiagen resin and reconstitution in aqueous solution; or lysis and denaturation in non-phenolic, aqueous solutions followed by enzymatic conversion of RNA to DNA template copies.

[0072] Normally, prior to applying the processes of the invention, steady state RNA expression levels for the genes, and sets of genes, disclosed herein will have been obtained. It is the steady state level of such expression that is affected by potential anti-neoplastic agents as determined herein. Such steady state levels of expression are easily determined by any methods that are sensitive, specific and accurate. Such methods include, but are in no way limited to, real time quantitative polymerase chain reaction (PCR), for example, using a Perkin-Elmer 7700 sequence detection system with gene specific primer probe combinations as designed using any of several commercially available software packages, such as Primer Express software., solid support based hybridization array technology using appropriate internal controls for quantitation, including filter, bead, or microchip based arrays, solid support based hybridization arrays using, for example, chemiluminescent, fluorescent, or electrochemical reaction based detection systems.

[0073] The gene expression indicative of a cancerous state need not be characteristic of every cell of a given tissue. Thus, the methods disclosed herein are useful for detecting the presence of a cancerous condition within a tissue where less than all cells exhibit the complete pattern. Thus, for example, a selected gene corresponding to the sequence of: one of the polynucleotide sequences of SEQ ID NO: 1-81, may be found, using appropriate probes, either DNA or RNA, to be present in as little as 60% of cells derived from a sample of tumorous, or malignant, tissue. In a highly preferred embodiment, such gene pattern is found to be present in at least 100% of cells drawn from a cancerous tissue and absent from at least 100% of a corresponding normal, non-cancerous, tissue sample.

[0074] Expression of a gene may be related to copy number, and changes in expression may be measured by determining copy number. Such change in gene copy number may be determined by determining a change in expression of messenger RNA encoded by a particular gene sequence, especially that of polynucleotide sequences of SEQ ID NO: 1-81. Also in accordance with the present invention, said gene may be a cancer initiating or facilitating gene. In carrying out the methods of the present invention, a cancer facilitating gene is a gene that, while not directly initiating tumor formation or growth, acts, such as through the actions of its expression product, to direct, enhance, or otherwise facilitate the progress of the cancerous condition, including where such gene acts against genes, or gene expression products, that would otherwise have the effect of decreasing tumor formation and/or growth.

[0075] Although the expression of a gene corresponding to a sequence of polynucleotide sequences of SEQ ID NO: 1-81 may be indicative of a cancerous status for a given cell, the mere presence of such a gene may not alone be sufficient to achieve a malignant condition and thus the level of expression of such gene may also be a significant factor in determining the attainment of a cancerous state. Thus, it becomes essential to also determine the level of expression of a gene as disclosed herein, including substantially similar sequences, as a separate means of diagnosing the presence of a cancerous status for a given cell, groups of cells, or tissues, either in culture or in situ.

[0076] The level of expression of the polypeptides disclosed herein is also a measure of gene expression, such as polypeptides having sequence identical, or similar to, any polypeptide encoded by a sequence of polynucleotide sequences of SEQ ID NO: 1-81, especially a polypeptide whose amino acid sequence is the sequence of polypeptide sequences of SEQ ID NO: 82-109.

[0077] In accordance with the foregoing, the present invention specifically contemplates a method for determining the cancerous status of a cell to be tested, comprising determining the level of expression in said cell of a gene that includes one of the nucleotide sequences selected from the sequences of polynucleotide sequences of SEQ ID NO: 1-81, including sequences substantially identical to said sequences, or characteristic fragments thereof, or the complements of any of the foregoing and then comparing said expression to that of a cell known to be non-cancerous whereby the difference in said expression indicates that said cell to be tested is cancerous.

[0078] In accordance with the invention, although gene expression for a gene that includes as a portion thereof one of the sequences of polynucleotide sequences of SEQ ID NO: 1-81, is preferably determined by use of a probe that is a fragment of such nucleotide sequence, it is to be understood that the probe may be formed from a different portion of the gene. Expression of the gene may be determined by use of a nucleotide probe that hybridizes to messenger RNA (mRNA) transcribed from a portion of the gene other than the specific nucleotide sequence disclosed herein.

[0079] It should be noted that there are a variety of different contexts in which genes have been evaluated as being involved in the cancerous process. Thus, some genes may be oncogenes and encode proteins that are directly involved in the cancerous process and thereby promote the occurrence of cancer in an animal. In addition, other genes may serve to suppress the cancerous state in a given cell or cell type and thereby work against a cancerous condition forming in an animal. Other genes may simply be involved either directly or indirectly in the cancerous process or condition and may serve in an ancillary capacity with respect to the cancerous state. All such types of genes are deemed with those to be determined in accordance with the invention as disclosed herein. Thus, the gene determined by said process of the invention may be an oncogene, or the gene determined by said process may be a cancer facilitating gene, the latter including a gene that directly or indirectly affects the cancerous process, either in the promotion of a cancerous condition or in facilitating the progress of cancerous growth or otherwise modulating the growth of cancer cells, either in vivo or ex vivo. In addition, the gene determined by said process may be a cancer suppressor gene, which gene works either directly or indirectly to suppress the initiation or progress of a cancerous condition. Such genes may work indirectly where their expression alters the activity of some other gene or gene expression product that is itself directly involved in initiating or facilitating the progress of a cancerous condition. For example, a gene that encodes a polypeptide, either wild or mutant in type, which polypeptide acts to suppress of tumor suppressor gene, or its expression product, will thereby act indirectly to promote tumor growth.

[0080] As noted previously, polynucleotides encoding the same proteins as any of polynucleotide sequences of SEQ ID NO: 1-81, regardless of the percent identity of such sequences, are also specifically contemplated by any of the methods of the present invention that rely on any or all of said sequences, regardless of how they are otherwise described or limited. Thus, any such sequences are available for use in carrying out any of the methods disclosed according to the invention. Such sequences also include any open reading frames, as defined herein, present within the sequence of polynucleotide sequences of SEQ ID NO: 1-81.

[0081] Because a gene disclosed according to the invention “corresponds to” a polynucleotide having a sequence of polynucleotide sequences of SEQ ID NO: 1-81, said gene encodes an RNA (processed or unprocessed, including naturally occurring splice variants and alleles) that is at least 90% identical, preferably at least 95% identical, most preferably at least 98% identical to, and especially identical to, an RNA that would be encoded by, or be complementary to, such as by hybridization with, a polynucleotide having the indicated sequence. In addition, genes including sequences at least 90% identical to a sequence selected from polynucleotide sequences of SEQ ID NO: 1-81, preferably at least about 95% identical to such a sequence, more preferably at least about 98% identical to such sequence and most preferably comprising such sequence are specifically contemplated by all of the processes of the present invention. Sequences encoding the same proteins as any of these sequences, regardless of the percent identity of such sequences, are also specifically contemplated by any of the methods of the present invention that rely on any or all of said sequences, regardless of how they are otherwise described or limited. The polynucleotide sequences of the invention also include any open reading frames, as defined herein, present within any of the sequences of polynucleotide sequences of SEQ ID NO: 1-81.

[0082] The sequences disclosed herein may be genomic in nature and thus represent the sequence of an actual gene, such as a human gene, or may be a cDNA sequence derived from a messenger RNA (mRNA) and thus represent contiguous exonic sequences derived from a corresponding genomic sequence, or they may be wholly synthetic in origin for purposes of practicing the processes of the invention. Because of the processing that may take place in transforming the initial RNA transcript into the final mRNA, the sequences disclosed herein may represent less than the full genomic sequence. They may also represent sequences derived from ribosomal and transfer RNAs. Consequently, the gene as present in the cell (and representing the genomic sequence) and the polynucleotide transcripts disclosed herein, including cDNA sequences, may be identical or may be such that the cDNAs contain less than the full genomic sequence. Such genes and cDNA sequences are still considered “corresponding sequences” (as defined elsewhere herein) because they both encode the same or related RNA sequences (i.e., related in the sense of being splice variants or RNAs at different stages of processing). Thus, by way of non-limiting example only, a gene that encodes an RNA transcript, which is then processed into a shorter mRNA, is deemed to encode both such RNAs and therefore encodes an RNA complementary to (using the usual Watson-Crick complementarity rules), or that would otherwise be encoded by, a cDNA (for example, a sequence as disclosed herein). Thus, the sequences disclosed herein correspond to genes contained in the cancerous cells (here, breast cancer) and are used to determine gene activity or expression because they represent the same sequence or are complementary to RNAs encoded by the gene. Such a gene also includes different alleles and splice variants that may occur in the cells used in the methods of the invention, such as where recombinant cells are used to assay for anti-neoplastic agents and such cells have been engineered to express a polynucleotide as disclosed herein, including cells that have been engineered to express such polynucleotides at a higher level than is found in non-engineered cancerous cells or where such recombinant cells express such polynucleotides only after having been engineered to do so. Such engineering includes genetic engineering, such as where one or more of the polynucleotides disclosed herein has been inserted into the genome of such cell or is present in a vector.

[0083] Such cells, especially mammalian cells, may also be engineered to express on their surfaces one or more of the polypeptides of the invention for testing with antibodies or other agents capable of masking such polypeptides and thereby removing the cancerous nature of the cell. Such engineering includes both genetic engineering, where the genetic complement of the cells is engineered to express the polypeptide, as well as non-genetic engineering, whereby the cell has been physically manipulated to incorporate a polypeptide of the invention in its plasma membrane, such as by direct insertion using chemical and/or other agents to achieve this result.

[0084] In accordance with the foregoing, the present invention includes anti-cancer agents that are themselves either polypeptides, or small chemical entities, that affect the cancerous process, including initiation, suppression or facilitation of tumor growth, either in vivo or ex vivo. Said cancer modulating agent will have the effect of decreasing gene expression.

[0085] The present invention thus also relates to a method for treating cancer comprising contacting a cancerous cell with an agent having activity against an expression product encoded by a gene sequence as disclosed herein, such as the sequence of polynucleotide sequences of SEQ ID NO: 1-81. The present invention also relates to a process for treating cancer comprising contacting a cancerous cell with an agent having activity against an expression product encoded by a gene sequence selected from the group consisting of polynucleotide sequences of SEQ ID NO: 1-81. In one such embodiment, the cancerous cell is contacted in vivo. In another such embodiment, said agent has affinity for said expression product. In a preferred embodiment, such agent is an antibody disclosed herein, such as an antibody that is specific or selective for, or otherwise reacts with, a polypeptide of the invention. In a preferred embodiment, the expression product is a polypeptide incorporating an amino acid sequence selected from polypeptide sequences of SEQ ID NO: 82-109.

[0086] The present invention is also directed to such uses of the compositions of polypeptides and antibodies disclosed herein. Such uses include a process for treating cancer in an animal afflicted therewith comprising administering to said animal an amount of an immunogenic composition of one or more of the polypeptides disclosed herein where such amount if an amount sufficient to elicit the production of cytotoxic T lymphocytes specific for a polypeptide of the invention, preferably a polypeptide incorporating a sequence of polypeptide sequences of SEQ ID NO: 82-109. In a preferred embodiment, the animal to be so treated is a human patient.

[0087] The proteins encoded by the genes disclosed herein due to their expression, or elevated expression, in cancer cells, represent highly useful therapeutic targets for “targeted therapies” utilizing such affinity structures as, for example, antibodies coupled to some cytotoxic agent. In such methodology, it is advantageous that nothing need be known about the endogenous ligands or binding partners for such cell surface molecules. Rather, an antibody or equivalent molecule that can specifically recognize the cell surface molecule (which could include an artificial peptide, a surrogate ligand, and the like) that is coupled to some agent that can induce cell death or a block in cell cycling offers therapeutic promise against these proteins. Thus, such approaches include the use of so-called suicide “bullets” against intracellular proteins. For example, monoclonal antibodies may readily by produced by methods well known in the art, for example, the method of Kohler and Milstein (see: Nature, 256:495 (1975).

[0088] With the advent of methods of molecular biology and recombinant technology, it is now possible to produce antibody molecules by recombinant means and thereby generate gene sequences that code for specific amino acid sequences found in the polypeptide structure of the antibodies. Such antibodies can be produced by either cloning the gene sequences encoding the polypeptide chains of said antibodies or by direct synthesis of said polypeptide chains, with in vitro assembly of the synthesized chains to form active tetrameric (H₂L₂) structures with affinity for specific epitopes and antigenic determinants. This has permitted the ready production of antibodies having sequences characteristic of neutralizing antibodies from different species and sources.

[0089] Regardless of the source of the antibodies, or how they are recombinantly constructed, or how they are synthesized, in vitro or in vivo, using transgenic animals, such as cows, goats and sheep, using large cell cultures of laboratory or commercial size, in bioreactors or by direct chemical synthesis employing no living organisms at any stage of the process, all antibodies have a similar overall 3 dimensional structure. This structure is often given as H₂L₂ and refers to the fact that antibodies commonly comprise 2 light (L) amino acid chains and 2 heavy (H) amino acid chains. Both chains have regions capable of interacting with a structurally complementary antigenic target. The regions interacting with the target are referred to as “variable” or “V” regions and are characterized by differences in amino acid sequence from antibodies of different antigenic specificity.

[0090] The variable regions of either H or L chains contains the amino acid sequences capable of specifically binding to antigenic targets. Within these sequences are smaller sequences dubbed “hypervariable” because of their extreme variability between antibodies of differing specificity. Such hypervariable regions are also referred to as “complementarity determining regions” or “CDR” regions. These CDR regions account for the basic specificity of the antibody for a particular antigenic determinant structure.

[0091] The CDRs represent non-contiguous stretches of amino acids within the variable regions but, regardless of species, the positional locations of these critical amino acid sequences within the variable heavy and light chain regions have been found to have similar locations within the amino acid sequences of the variable chains. The variable heavy and light chains of all antibodies each have 3 CDR regions, each non-contiguous with the others (termed L1, L2, L3, H1, H2, H3) for the respective light (L) and heavy (H) chains. The accepted CDR regions 25 have been described by Kabat et al., J. Biol. Chem. 252:6609-6616 (1977).

[0092] In all mammalian species, antibody polypeptides contain constant (i.e., highly conserved) and variable regions, and, within the latter, there are the CDRs and the so-called “framework regions” made up of amino acid sequences within the variable region of the heavy or light chain but outside the CDRs.

[0093] The antibodies disclosed according to the invention may also be wholly synthetic, wherein the polypeptide chains of the antibodies are synthesized and, possibly, optimized for binding to the polypeptides disclosed herein as being receptors. Such antibodies may be chimeric or humanized antibodies and may be fully tetrameric in structure, or may be dimeric and comprise only a single heavy and a single light chain. Such antibodies may also include fragments, such as Fab and F(ab₂)′ fragments, capable of reacting with and binding to any of the polypeptides disclosed herein as being receptors.

[0094] In one aspect, the present invention relates to immunoglobulins, or antibodies, as described herein, that react with, especially where they are specific for, the polypeptides having amino acid sequences as disclosed herein, preferably those having an amino acid sequence of one of polypeptide sequences of SEQ ID NO: 82-109. Such antibodies may commonly be in the form of a composition, especially a pharmaceutical composition. Such antibodies, by themselves, may have therapeutic value in that they are able to bind to, and thereby tie up, surface sites on cancerous cells. Where such sites have some type of function to perform (i.e., where they are surface enzymes, or channel structures, or structures that otherwise facilitate, actively or passively, the transport of nutrients and other vital materials to the cell. Such nutrients serve to facilitate the growth and replication of the cell and molecules that bind to such sites and thereby interfere with such activities can prove to have a therapeutic effect in that the result of such binding is to remove sources of nutrients from such cells, thereby interfering with growth and replication. In like manner, such binding may serve to remove vital enzyme activities from the cell's functional repertoire, thereby also interfering with viability and/or the ability of the cell to multiply or metastasize. In addition, by binding to such surface sites, the antibodies may serve to prevent the cells from reacting to environmental agents, such as cytokines and the like, that may facilitate growth, replication and metastasis, thereby further reducing the cancerous status of such cell and ameliorating the cancerous condition in a patient, even without proving fatal to the cell or cells so affected.

[0095] The methods of the present invention also include processes wherein the cancer cell is contacted in vivo as well as ex vivo with an agent that comprises a portion, or is part of an overall molecular structure, having affinity for an expression product of a gene corresponding to a polynucleotide sequence as disclosed herein, preferably where the expression product is a cell surface structure, most preferably a polypeptide as disclosed herein, such as one that comprises an amino acid sequence of polypeptide sequences of SEQ ID NO: 82-109. In one such embodiment, said portion having affinity for said expression product is an antibody, especially where said expression product is a polypeptide or oligopeptide or comprises an oligopeptide portion, or comprises a polypeptide.

[0096] In another aspect, the present invention also relates to an antibody that reacts with a polypeptide as disclosed herein, preferably a polypeptide comprising an amino acid sequence selected from the group consisting of polynucleotide sequences of SEQ ID NO: 1-81. Such an antibody may be polyclonal, monoclonal, recombinant or synthetic in origin. In one such embodiment, said antibody is associated, either covalently or non-covalently, with a cytotoxic agent, for example, an apoptotic agent. It is thus contemplated that the antibody acts a targeted vector for guiding an associated therapeutic agent to a cancerous cell, such as a cell expressing a polypeptide homologous to, if not identical to, a polypeptide as disclosed herein.

[0097] Where the cytotoxic agent is itself a polypeptide, said may be linked directly to an antibody specific for a surface target on a cancer cell, such as where the polypeptide represents an extension of the amino acid chain of the antibody. In alternative embodiments, such molecules may be covalently linked through a linker sequence of long or short duration, such as an amino acid sequence of 5 to 10 residues in length. Where the cytotoxic agents is some small organic molecule, such as a small organic compound, or some type of apoptotic agent, this may be covalently bonded to the antibody molecule or may be attached by some other type of non-covalent linkage, including hydrophobic and electrostatic linkages. Methods for forming such linkages, especially covalent linkages, are well known to those skilled in the art.

[0098] The antibodies disclosed herein may also serve as targeting vectors for much larger structures, such as liposomes. In one such embodiment, an antibody is part of, or otherwise linked to, or associated with, a membranous structure, preferably a liposome or possibly some type of cellular organelle, which acts as a reservoir for a cytotoxic agent, such as ricin. The antibody then acts to target said liposome to a cancerous tissue in an animal, whereupon the liposome provides a source of cytotoxic agents for localized treatment of a solid tumor or other type of neoplasm.

[0099] The present invention further encompasses an immunogenic composition comprising a polypeptide disclosed herein, as well as compositions formed using antibodies specific for these polypeptides.

[0100] Methods well known in the art for making formulations are found in, for example, Remington: The Science and Practice of Pharmacy, (19th ed.) Ed. A. R. Gennaro, 1995, Mack Publishing Company, Easton, Pa. Formulations for parenteral administration may, for example, contain excipients, sterile water, or saline, polyalkylene glycols such as polyethylene glycol, oils of vegetable origin, or hydrogenated napthalenes. Biocompatible, biodegradable lactide polymer, lactide/glycolide copolymer, or polyoxyethylene-polyoxypropylene copolymers may be used to control the release of the compounds. Other potentially useful parenteral delivery systems for agonists of the invention include ethylenevinyl acetate copolymer particles, osmotic pumps, implantable infusion systems, and liposomes. Formulations for inhalation may contain excipients, or example, lactose, or may be aqueous solutions containing, for example, polyoxyethylene-9-lauryl ether, glycocholate and deoxycholate, or may be oily solutions for administration in the form of nasal drops, or as a gel. It should be noted that, where the therapeutic agent to be administered is an immunoconjugate, these sometimes contain chemical linkages that are somewhat labile in aqueous media and therefor must be stored prior to administration is a more stable environment, such as in the form of a lyophilized powder.

[0101] Such an agent can be a single molecular structure, comprising both affinity portion and anti-cancer activity portions, wherein said portions are derived from separate molecules, or molecular structures, possessing such activity when separated and wherein such agent has been formed by combining said portions into one larger molecular structure, such as where said portions are combined into the form of an adduct. Said anti-cancer and affinity portions may be joined covalently, such as in the form of a single polypeptide, or polypeptide-like, structure or may be joined non-covalently, such as by hydrophobic or electrostatic interactions, such structures having been formed by means well known in the chemical arts. Alternatively, the anti-cancer and affinity portions may be formed from separate domains of a single molecule that exhibits, as part of the same chemical structure, more than one activity wherein one of the activities is against cancer cells, or tumor formation or growth, and the other activity is affinity for an expression product produced by expression of genes related to the cancerous process or condition.

[0102] In one embodiment of the present invention, a chemical agent, such as a protein or other polypeptide, is joined to an agent, such as an antibody, having affinity for an expression product of a cancerous cell, such as a polypeptide or protein encoded by a gene related to the cancerous process, preferably a gene as disclosed herein according to the present invention, most preferably a polypeptide sequence disclosed herein. Thus, where the presence of said expression product is essential to tumor initiation and/or growth, binding of said agent to said expression product will have the effect of negating said tumor promoting activity. In one such embodiment, said agent is an apoptosis-inducing agent that induces cell suicide, thereby killing the cancer cell and halting tumor growth.

[0103] Other genes within the cancer cell that are regulated in a manner similar to that of the genes disclosed herein and thus change their expression in a coordinated way in response to chemical compounds represent genes that are located within a common metabolic, signaling, physiological, or functional pathway so that by analyzing and identifying such commonly regulated groups of genes (groups that include the gene, or similar sequences, disclosed according to the invention, one can (a) assign known genes and novel genes to specific pathways and (b) identify specific functions and functional roles for novel genes that are grouped into pathways with genes for which their functions are already characterized or described. For example, one might identify a group of 10 genes, at least one of which is the gene as disclosed herein, that change expression in a coordinated fashion and for which the function of one, such as the polypeptide encoded by the sequence disclosed herein, is known then the other genes are thereby implicated in a similar function or pathway and may thus play a role in the cancer-initiating or cancer-facilitating process. In the same way, if a gene were found in normal cells but not in cancer cells, or happens to be expressed at a higher level in normal as opposed to cancer cells, then a similar conclusion may be drawn as to its involvement in cancer, or other diseases. Therefore, the processes disclosed according to the present invention at once provide a novel means of assigning function to genes, i.e. a novel method of functional genomics, and a means for identifying chemical compounds that have potential therapeutic effects on specific cellular pathways. Such chemical compounds may have therapeutic relevance to a variety of diseases outside of cancer as well, in cases where such diseases are known or are demonstrated to involve the specific cellular pathway that is affected.

[0104] The polypeptides disclosed herein, preferably those of polypeptide sequences of SEQ ID NO: 82-109, also find use as vaccines in that, where the polypeptide represents a surface protein present on a cancer cell, such polypeptide may be administered to an animal, especially a human being, for purposes of activating cytotoxic T lymphocytes (CTLs) that will be specific for, and act to lyze, cancer cells in said animal. Where used as vaccines, such polypeptides are present in the form of a pharmaceutical composition. The present invention may also employ polypeptides that have the same, or similar, immunogenic character as the polypeptides of polypeptide sequences of SEQ ID NO: 82-109 and thereby elicit the same, or similar, immunogenic response after administration to an animal, such as an animal at risk of developing cancer, or afflicted therewith. Thus, the polypeptides disclosed according to the invention will commonly find use as immunogenic compositions.

[0105] Expression of a gene corresponding to a polynucleotide disclosed herein, when in normal tissues, may indicate a predisposition towards development of breast cancer. The encoded polypeptide might then present a potentially useful cell surface target for therapeutic molecules such as cytolytic antibodies, or antibodies attached to cytotoxic, or cytolytic, agents.

[0106] The present invention specifically contemplates use of antibodies against the polypeptides encoded by the polynucleotides corresponding to the genes disclosed herein, whereby said antibodies are conjugates to one or more cytotoxic agents so that the antibodies serve to target the conjugated immunotoxins to a region of cancerous activity, such as a solid tumor. For many known cytotoxic agents, lack of selectivity has presented a drawback to their use as therapeutic agents in the treatment of malignancies. For example, the class of two-chain toxins, consisting of a binding subunit (or B-chain) linked to a toxic subunit (A-chain) are extremely cytotoxic. Thus, such agents as ricin, a protein isolated from castor beans, kills cells at very low concentrations (even less than 10⁻¹¹ M) by inactivating ribosomes in said cells (see, for example, Lord et al., Ricin: structure, mode of action, and some current applications. Faseb J, 8: 201-208 (1994), and Blättler et al., Realizing the full potential of immunotoxins. Cancer Cells, 1: 50-55 (1989)). While isolated A-chains of protein toxins that functionally resemble ricin A-chain are only weakly cytotoxic for intact cells (in the concentration range of 10⁻⁷ to 10⁻⁶ M), they are very potent cytotoxic agents inside the cells. Thus, a single molecule of the A-subunit of diphtheria toxin can kill a cell once inside (see: Yamaizumi et al., One molecule of diphtheria toxin fragment A introduced into a cell can kill the cell. Cell, 15: 245-250, 1978).

[0107] The present invention solves this selectivity problem by using antibodies specific for antigens present on cancer cells to target the cytotoxins to said cells. In addition, use of antibodies decreases toxicity because the antibodies are non-toxic until they reach the tumor and, because the cytotoxin is bound to the antibody, it is presented with less opportunity to cause damage to non-targeted tissues.

[0108] In addition, use of such antibodies alone can provide therapeutic effects on the tumor through the antibody-dependent cellular cytotoxic response (ADCC) and complement-mediated cell lysis mechanisms.

[0109] A number of recombinant immunotoxins (for example, consisting of Fv regions of cancer specific antibodies fused to truncated bacterial toxins) are well known (see, for example, Smyth et al., Specific targeting of chlorambucil to tumors with the use of monoclonal antibodies, J. Natl. Cancer Inst, 76(3):503-510 (1986); Cho et al., Single-chain Fv/folate conjugates mediate efficient lysis of folate-receptor-positive tumor cells, Bioconjug. Chem., 8(3):338-346 (1997)). As noted in the literature, these may contain, for example, a truncated version of Pseudomonas exotoxin as a toxic moiety but the toxin is modified in such a manner that by itself it does not bind to normal human cells, but it retains all other functions of cytotoxicity. Here, recombinant antibody fragments target the modified toxin to cancer cells which are killed, such as by direct inhibition of protein synthesis, or by concomitant induction of apoptosis. Cells that are not recognized by the antibody fragment, because they do not carry the cancer antigen, are not affected. Good activity and specificity has been observed for many recombinant immunotoxins in in vitro assays using cultured cancer cells as well as in animal tumor models. Ongoing clinical trials provide examples where the promising pre-clinical data correlate with successful results in experimental cancer therapy. (see, for example, Brinkmann U., Recombinant antibody fragments and immunotoxin fusions for cancer therapy, In Vivo (2000) 14:21-27).

[0110] While the safety of employing immunoconjugates in humans has been established, in vivo therapeutic results have been less impressive. Because clinical use of mouse MAbs in humans is limited by the development of a foreign anti-globulin immune response by the human host, genetically engineered chimeric human-mouse MAbs have been developed by replacing the mouse Fc region with the human constant region. In other cases, the mouse antibodies have been “humanized” by replacing the framework regions of variable domains of rodent antibodies by their human equivalents. Such humanized and engineered antibodies can even be structurally arranged to have specificities and effector functions determined by design and which characteristics do not appear in nature. The development of bispecific antibodies, having different binding ends so that more than one antigenic site can be bound, have proven useful in targeting cancer cells. Thus, such antibody specificity has been improved by chemical coupling to various agents such as bacterial or plant toxins, radionuclides or cytotoxic drugs and other agents. (see, for example, Bodey, B. et al). Genetically engineered monoclonal antibodies for direct anti-neoplastic treatment and cancer cell specific delivery of chemotherapeutic agents. Curr Pharm Des (2000) Feb;6(3):261-76). See also, Garnett, M. C., Targeted drug conjugates: principles and progress. Adv. Drug Deliv. Rev. (Dec. 17, 2001) 53(2):171-216; Brinkmann et al., Recombinant immunotoxins for cancer therapy. Expert Opin Biol Ther. (2001) 1(4):693-702.

[0111] Among the cytotoxic agents specifically contemplated for use as immunoconjugates according to the present invention are Calicheamicin, a highly toxic enediyne antibiotic isolated from Micromonospora echinospora ssp. Calichensis, and which binds to the minor groove of DNA to induce double strand breaks and cell death (see: Lee et al., Calicheamicins, a novel family of antitumor antibiotics. 1. Chemistry and partial structure of calichemicin g₁. J Am Chem Soc, 109: 3464-3466 (1987); Zein et al., Calicheamicin gamma 1I. an antitumor antibiotic that cleaves double-stranded DNA site specifically, Science, 240: 1198-1201 (1988)). Useful derivatives of the calicheamicins include mylotarg and 138H11-Camθ. Mylotarg is an immunoconjugate of a humanized anti-CD33 antibody (CD33 being found in leukemic cells of most patients with acute myeloid leukemia) and N-acetyl gamma colicheamicin dimethyl hydrazide, the latter of which is readily coupled to an antibody of the present invention (in place of the anti-CD33 but which can also be humanized by substitution of human framework regions into the antibody during production as described elsewhere herein) to form an immunoconjugate of the invention. (see: Hamann et al. Gemtuzumab Ozogamicin, A Potent and Selective Anti-CD33 Antibody-Calicheamicin Conjugate for Treatment of Acute Myeloid Leukemia, Bioconjug. Chem. 13, 47-58 (2002)) For use with 138H11-Camθ, 138H11 is an anti-γ-glutamyl transferase antibody coupled to theta calicheamicin through a disulfide linkage and found useful in vitro against cultured renal cell carcinoma cells. (see: Knoll et al., Targeted therapy of experimental renal cell carcinoma with a novel conjugate of monoclonal antibody 138H11 and calicheamicin θ₁^{I}, Cancer Res, 60: 6089-6094 (2000) The same linkage may be utilized to link this cytotoxic agent to an antibody of the present invention, thereby forming a targeting structure for breast cancer cells. 25 Also useful in forming the immunoconjugates of the invention is DC1, a disulfide-containing analog of adozelesin, that kills cells by binding to the minor groove of DNA, followed by alkylation of adenine bases. Adozelesin is a structural analog of CC-1065, an anti-tumor antibiotic isolated from microbial fermentation of Streptomyces zelensis, and is about 1,000 fold more toxic to cultured cell lines that other DNA interacting agents, such as cis-platin and doxorubicin. This agent is readily linked to antibodies through the disulfide bond of adozelesin. (see: Chari et al., Enhancement of the selectivity and antitumor efficacy of a CC-1065 analogue through immunoconjugate formation, Cancer Res, 55: 4079-4084 (1995)).

[0112] Maytansine, a highly cytotoxic microtubular inhibitor isolated from the shrub Maytenus serrata found to have little value in human clinical trials, is much more effective in its derivatized form, denoted DM1, containing a disulfide bond to facilitate linkage to antibodies, is up to 10-fold more cytotoxic (see: Chari et al., Immunoconjugates containing novel maytansinoids: promising anticancer drugs, Cancer Res, 52: 127-131 (1992)). These same in vitro studies showed that up to four DM1 molecules could be linked to a single immunoglobulin without destroying the binding affinity. Such conjugates have been used against breast cancer antigens, such as the neu/HER2/erbB-2 antigen. (see: Goldmacher et al., Immunogen, Inc., (2002) in press); also see Liu, C. et al., Eradication of large colon tumor xenografts by targeted delivery of maytansinoids, Proc. Natl. Acad. Sci. USA, 93, 8618-8623 (1996)). For example, Liu et al. (1996) describes formation of an immunoconjugate of the maytansinoid cytotoxin DM1 and C242 antibody, a murine IgG1 immunoglobulin, available from Pharmacia and which has affinity for a mucin-like glycoprotein variably expressed by human colorectal cancers. The latter immunoconjugate was prepared according to Chari et al., Cancer Res., 52:127-131 (1992) and was found to be highly cytotoxic against cultured colon cancer cells as well as showing anti-tumor effects in vivo in mice bearing subcutaneous COLO 205 human colon tumor xenografts using doses well below the maximum tolerated dose.

[0113] In addition, there are a variety of protein toxins (cytotoxic proteins), which include a number of different classes, such as those that inhibit protein synthesis: ribosome-inactivating proteins of plant origin, such as ricin, abrin, gelonin, and a number of others, and bacterial toxins such as pseudomonas exotoxin and diphtheria toxin.

[0114] Another useful class is the one including taxol, taxotere, and taxoids. Specific examples include paclitaxel (taxol), its analog docetaxel (taxotere), and derivatives thereof. The first two are clinical drugs used in treating a number of tumors while the taxoids act to induce cell death by inhibiting the de-polymerization of tubulin. Such agents are readily linked to antibodies through disulfide bonds without disadvantageous effects on binding specificity.

[0115] In one instance, a truncated Pseudomonas exotoxin was fused to an anti-CD22 variable fragment and used successfully to treat patients with chemotherapy-resistant hairy-cell leukemia. (see: Kreitman et al., Efficacy of the anti-CD22 recombinant immunotoxin BL22 in chemotherapy-resistant hairy-cell leukemia, N Engl J Med, 345: 241-247 (2001)) Conversely, the cancer-linked peptides of the present invention offer the opportunity to prepare antibodies, recombinant or otherwise, against the appropriate antigens to target solid tumors, preferably those of malignancies of breast tissue, using the same or similar cytotoxic conjugates. Thus, many of the previously used immunoconjugates have been formed using antibodies against general antigenic sites linked to cancers whereas the antibodies formed using the peptides disclosed herein are more specific and target the antibody-cytotoxic agent to a particular tissue or organ, thus further reducing toxicity and other undesirable side effects.

[0116] In addition, the immunoconjugates formed using the antibodies prepared against the cancer-linked antigens disclosed herein can be formed by any type of chemical coupling. Thus, the cytotoxic agent of choice, along with the immunoglobulin, can be coupled by any type of chemical linkage, covalent or non-covalent, including electrostatic linkage, to form the immunoconjugates of the present invention.

[0117] When used as immunoconjugates, the antitumor agents of the present invention represent a class of pro-drugs that are relatively non-toxic when first administered to an animal (due mostly to the stability of the immunoconjugate), such as a human patient, but which are targeted by the conjugated immunoglobulin to a cancer cell where they then exhibit good toxicity. The tumor-related, associated, or linked, antigens, preferably those presented herein, serve as targets for the antibodies (monoclonal, recombinant, and the like) specific for said antigens. The end result is the release of active cytotoxic agent inside the cell after binding of the immunoglobulin portion of the immunoconjugate.

[0118] The cited references describe a number of useful procedures for the chemical linkage of cytotoxic agents to immunoglobulins and the disclosures of all such references cited herein are hereby incorporated by reference in their entirety. For other reviews see Ghetie et al., Immunotoxins in the therapy of cancer: from bench to clinic, Pharmacol Ther, 63: 209-234 (1994), Pietersz et al. The use of monoclonal antibody immunoconjugates in cancer therapy, Adv Exp Med Biol, 353:169-179 (1994), and Pietersz, G. A. The linkage of cytotoxic drugs to monoclonal antibodies for the treatment of cancer, Bioconjug Chem, 1:89-95 (1 990).

[0119] Thus, the present invention provides highly useful cancer-associated antigens for generation of antibodies for linkage to a number of different cytotoxic agents which are already known to have some in vitro toxicity and possess chemical groups available for linkage to antibodies.

[0120] The present invention also relates to a process that comprises a method for generating test data comprising identifying an agent according to one of the disclosed processes for identifying such an agent (i.e., the therapeutic agents identified according to the assay procedures disclosed herein) wherein said product is the data collected with respect to said agent as a result of said identification process, or assay, and wherein said data is sufficient to convey the chemical character and/or structure and/or properties of said agent. For example, the present invention specifically contemplates a situation whereby a user of an assay of the invention may use the assay to screen for compounds having the desired enzyme modulating activity and, having identified the compound, then conveys that information (i.e., information as to structure, dosage, etc) to another user who then utilizes the information to reproduce the agent and administer it for therapeutic or research purposes according to the invention. For example, the user of the assay (user 1) may screen a number of test compounds without knowing the structure or identity of the compounds (such as where a number of code numbers are used the first user is simply given samples labeled with said code numbers) and, after performing the screening process, using one or more assay processes of the present invention, then imparts to a second user (user 2), verbally or in writing or some equivalent fashion, sufficient information to identify the compounds having a particular modulating activity (for example, the code number with the corresponding results). This transmission of information from user 1 to user 2 is specifically contemplated by the present invention.

[0121] In one embodiment of the foregoing, the present invention relates to a method for producing test data with respect to the gene modulating activity of a compound comprising:

[0122] (a) contacting a compound with a cell containing a gene that corresponds to a polynucleotide having a sequence selected from the group consisting of polynucleotide sequences of SEQ ID NO: 1-81 and under conditions promoting the expression of said gene; and

[0123] (b) detecting a difference in expression of said gene relative to when said compound is not present

[0124] (c) and producing test data with respect to the gene modulating activity of said compound based on a decrease in the expression of the determined genes that correspond to SEQ ID NO: 1-81 indicating gene modulating action.

[0125] It should be cautioned that, in carrying out the procedures of the present invention as disclosed herein, whether to form immunoconjugates or screen for other antitumor agents using the genes and polypeptides disclosed herein, any reference to particular buffers, media, reagents, cells, culture conditions and the like are not intended to be limiting, but are to be read so as to include all related materials that one of ordinary skill in the art would recognize as being of interest or value in the particular context in which that discussion is presented. For example, it is often possible to substitute one buffer system or culture medium for another and still achieve similar, if not identical, results. Those of skill in the art will have sufficient knowledge of such systems and methodologies so as to be able, without undue experimentation, to make such substitutions as will optimally serve their purposes in using the methods and procedures disclosed herein.

[0126] The present invention will now be further described by way of the following non-limiting example. In applying the disclosure of the example, it should be kept clearly in mind that other and different embodiments of the methods disclosed according to the present invention will no doubt suggest themselves to those of skill in the relevant art. The following example shows how a potential anti-neoplastic agent may be identified using one or more of the genes disclosed herein.

### EXAMPLE

### Determination of Gene Inhibitory Activity of an Anti-Neoplastic Agent

[0127] SW480 cells are grown to a density of 10⁵ cells/cm² in Leibovitz's L-15 medium supplemented with 2 mM L-glutamine (90%) and 10% fetal bovine serum. The cells are collected after treatment with 0.25% trypsin, 0.02% EDTA at 37° C. for 2 to 5 minutes. The trypsinized cells are then diluted with 30 ml growth medium and plated at a density of 50,000 cells per well in a 96 well plate (100 μl/well). The following day, cells are treated with either compound buffer alone, or compound buffer containing a chemical agent to be tested, for 24 hours. The media is then removed, the cells lysed and the RNA recovered using the RNAeasy reagents and protocol obtained from Qiagen. RNA is quantitated and 10 ng of sample in 1 μl are added to 24 μl of Taqman reaction mix containing 1× PCR buffer, RNAsin, reverse transcriptase, nucleoside triphosphates, amplitaq gold, tween 20, glycerol, bovine serum albumin (BSA) and specific PCR primers and probes for a reference gene (18S RNA) and a test gene (Gene X). Reverse transcription is then carried out at 48° C. for 30 minutes. The sample is then applied to a Perlin Elmer 7700 sequence detector and heat denatured for 10 minutes at 95° C. Amplification is performed through 40 cycles using 15 seconds annealing at 60° C. followed by a 60 second extension at 72° C. and 30 second denaturation at 95° C. Data files are then captured and the data analyzed with the appropriate baseline windows and thresholds.

[0128] The quantitative difference between the target and reference gene is then calculated and a relative expression value determined for all of the samples used. In this way, the ability of a chemotherapeutic agent to effectively and selectively reduce the activity of a cancer-specific gene is readily ascertained. The overall expression of the cancer-specific gene, as modulated by one chemical agent relative to another, is also determined. Chemical agents having the most effect in reducing gene activity are thereby identified as the most anti-neoplastic.

### References

[0129] Walter A. Blättler and Ravi Chari: Drugs to enhance the therapeutic potency of anti-cancer antibodies: antibody-drug conjugates as tumor-activated prodrugs. In Anticancer Agents—Frontiers in Cancer Chemotherapy (Iwao Ojima, Gregory D. Vite, Karl-Heinz Altmann, Eds.), American Chemical Society, pp. 317-338 (2001).

[0130] Dan L. Longo, Patricia L. Duffey, John G. Gribben, Elaine S. Jaffe, Brendan D. Curti, Barry L. Gause, John E. Janik, Virginia M. Braman, Dixie Esseltine, Wyndham H. Wilson, Dwight Kaufman, Robert E. Wittes, Lee M. Nadler, and Walter J. Urba: Combination chemotherapy followed by an Immunotoxin (Anti-B4-blocked Ricin) in patients with indolent lymphoma: results of a Phase II study. Cancer J. 6, 146-150 (2000).

[0131] Walter A. Blättler and John M. Lambert: Preclinical immunotoxin development. In Monoclonal Antibody-Based Therapy of Cancer (M. Grossbard, Ed.), Marcel Dekker, Inc. NY, N.Y., pp. 1-22 (1998).

[0132] Ravi V. J. Chari: Targeted delivery of chemotherapeutics: tumor-activated prodrug therapy. In Advanced Drug Delivery Reviews, Elsevier Science B. V., pp. 89-104 (1998).

[0133] David T. Scadden, David P. Schenkein, Zale Bernstein, Barry Luskey, John Doweiko, Anil Tulpule, and Alexandra M. Levine: Immunotoxin combined with chemotherapy for patients with AIDS-related Non-Hodgkin's Lymphoma. Cancer 83, 2580-2587 (1998).

[0134] Changnian Liu and Ravi VJ Chari: The development of antibody delivery systems to target cancer with highly potent maytansinoids. Exp. Opi. Invest. Drugs 6, 169-172 (1997).

[0135] A. C. Goulet, Viktor S. Goldmacher, John M. Lambert, C. Baron, Dennis C. Roy and E. Kouassi: Conjugation of blocked ricin to an anti-CD19 monoclonal antibody increases antibody-induced cell calcium mobilization and CD19 internalization. Blood 90, 2364-2375 (1997).

[0136] Changnian Liu, John M. Lambert, Beverly A. Teicher, Walter A. Blättler, and Rosemary O'Connor: Cure of multidrug-resistant human B-cell lymphoma xenografts by combinations of anti-B4-blocked ricin and chemotherapeutic drugs. Blood 87, 3892-3898 (1996).

[0137] Rajeeva Singh, Lana Kats, Walter A. Blättler, and John M. Lambert: Formation of N-Substituted 2-Iminothiolanes when amino groups in proteins and peptides are modified by 2-Iminothiolane. Anal. Biochem. 236, 114-125 (1996).

[0138] Changnian Liu, B. Mitra Tadayoni, Lizabeth A. Bourret, Kristin M. Mattocks, Susan M. Derr, Wayne C. Widdison, Nancy L. Kedersha, Pamela D. Ariniello, Victor S. Goldmacher, John M. Lambert, Walter A. Blättler, and Ravi V. J. Chari: Eradication of large colon tumor xenografts by targeted delivery of maytansinoids. Proc. Natl. Acad. Sci. USA 93, 8618-8623 (1996).

[0139] Denis C. Roy, Sophie Ouellet, Christiane Le Houiller, Pamela D. Ariniello, Claude Perreault and John M. Lambert: Elimination of neuroblastoma and small-cell lung cancer cells with an anti-neural cell adhesion molecule immunotoxin. J. Natl. Cancer Inst. 88, 1136-1145 (1996).

[0140] Walter A. Blättler, Ravi V. J. Chari and John M. Lambert: Immunoconjugates. In Cancer Therapeutics: Experimental and Clinical Agents. (B. Teicher, Ed.), Humana Press, Totowa, N.J., pp. 371-394 (1996).

[0141] Michael L. Grossbard, John M. Lambert, Victor S. Goldmacher, Arnold S. Freedman, Jeanne Kinsella, Danny P. Ducello, Susan N. Rabinowe, Laura Elisea, Felice Carol, James A. Taylor, Walter A. Blättler, Carol L. Epstein, and Lee M. Nadler: Anti-B4-blocked Ricin: A phase I trial of 7 day continuous infusion in patients with B-cell neoplasms. J. Clin. Oncol. 11, 726-737 (1993).

[0142] Michael L. Grossbard, John G. Gribben, Arnold S. Freedman, John M. Lambert, Jeanne Kinsella, Susan N. Rabinowe, Laura Eliseo, James A. Taylor, Walter A. Blättler, Carol L. Epstein, and Lee M. Nadler: Adjuvant immunotoxin therapy with anti-B4-blocked ricin following autologous bone marrow transplantation for patients with B-cell Non-Hodgkin's lymphoma. Blood 81, 2263-2271 (1993).

[0143] Sudhir A. Shah, Patricia M. Halloran, Cynthia A. Ferris, Beth A. Levine, Lizabeth A. Bourret, Victor S. Goldmacher, and Walter A. Blättler: Anti-B4-blocked Ricin immunotoxin shows therapeutic efficacy in four different SCID mouse tumor models. Cancer Res. 53, 1360-1367 (1993).

[0144] Ravi V. J. Chari, Bridget A. Martell, Jonathan L. Gross, Sherilyn B. Cook, Sudhir A. Shah, Walter A. Blättler, Sara J. McKenzie, and Victor S. Goldmacher: Immunoconjugates containing novel maytansinoids: promising anti-cancer drugs. Cancer Res. 52, 127-131 (1992).

[0145] John M. Lambert, Peter D. Senter, Annie Yau-Young, Walter A. Blättler, and Victor S. Goldmacher: Purified immunotoxins that are reactive with human lymphoid cells. J. Biol. Chem. 250, 12035-12041 (1985).

What is claimed is:

1. A process for identifying an agent that modulates the activity of a cancer-related gene comprising:
(a) contacting a compound with a cell containing a gene that corresponds to a polynucleotide having a sequence selected from the group consisting of polynucleotide sequences of SEQ ID NO: 1-81 and under conditions promoting the expression of said gene; and
(b) detecting a difference in expression of said gene relative to when said compound is not present
thereby identifying an agent that modulates the activity of a cancer-related gene.

2. The process of claim 1 wherein said gene has a sequence selected from the group consisting of polynucleotide sequences of SEQ ID NO: 1-81.

3. The process of claim 1 or 2 wherein the cell is a cancer cell and the difference in expression is a decrease in expression.

4. The process of claim 3 wherein said cancer cell is a breast cancer cell.

5. A process for identifying an anti-neoplastic agent comprising contacting a cell exhibiting neoplastic activity with a compound first identified as a cancer related gene modulator using a process of one of claims 1-4 and detecting a decrease in said neoplastic activity after said contacting compared to when said contacting does not occur.

6. The process of claim 5 wherein said neoplastic activity is accelerated cellular replication.

7. The process of claim 5 wherein said decrease in neoplastic activity results from the death of the cell.

8. A process for identifying an anti-neoplastic agent comprising administering to an animal exhibiting a cancer condition an effective amount of an agent first identified according to a process of one of claims 1 and detecting a decrease in said cancerous condition.

9. A process for determining the cancerous status of a cell, comprising determining an increase in the level of expression in said cell of a gene that corresponds to a polynucleotide having a sequence selected from the group consisting of polynucleotide sequences of SEQ ID NO: 1-81 wherein an elevated expression relative to a known non-cancerous cell indicates a cancerous state or potentially cancerous state.

10. The process of claim 9 wherein said elevated expression is due to an increased copy number.

11. An isolated polypeptide comprising an amino acid sequence homologous to an amino acid sequence selected from the group consisting of the polypeptide sequences of SEQ ID NO: 82-109 wherein any difference between said amino acid sequence and the sequence of polypeptide sequences of SEQ ID NO: 82-109 is due solely to conservative amino acid substitutions and wherein said isolated polypeptide comprises at least one immunogenic fragment.

12. An isolated polypeptide comprising an amino acid sequence selected from the group consisting of the polypeptide sequences of SEQ ID NO: 82-109.

13. An antibody that binds to a polypeptide comprising an amino acid sequence selected from the group consisting of polypeptide sequences of SEQ ID NO: 82-109.

14. The antibody of claim 13 wherein said antibody is a recombinant antibody.

15. The antibody of claim 13 wherein said antibody is a synthetic antibody.

16. The antibody of claim 13 wherein said antibody is a humanized antibody.

17. An immunoconjugate comprising the antibody of claim 13 and a cytotoxic agent.

18. The immunoconjugate of claim 17 wherein said cytotoxic agent is a member selected from the group consisting of a calicheamicin, a maytansinoid, an adozelesin, a cytotoxic protein, a taxol, a taxotere, a taxoid and DC1.

19. The immunoconjugate of claim 18 wherein said calicheamicin is calicheamicin γ₁^{I}, N-acetyl gamma calicheamicin dimethyl hydrazide or calicheamicin θ₁^{I}.

20. The immunoconjugate of claim 18 wherein said maytansinoid is DM1.

21. The immunoconjugate of claim 18 wherein said cytotoxic protein is ricin, abrin, gelonin, pseudomonas exotoxin or diphtheria toxin.

22. The immunoconjugate of claim 18 wherein said taxol is paclitaxel.

23. The immunoconjugate of claim 18 wherein said taxotere is docetaxel.

24. A process for treating cancer comprising contacting a cancerous cell in vivo with an agent having activity against an expression product encoded by a gene sequence selected from the group consisting of polynucleotide sequences of SEQ ID NO: 1-81.

25. The process of claim 24 wherein said agent is an antibody of claim 13-16.

26. The process of claim 24 wherein said agent is an immunoconjugate of claim 17.

27. An immunogenic composition comprising a polypeptide of claim 11.

28. An immunogenic composition comprising a polypeptide of claim 12.

29. The process of claim 24 wherein said cancer is breast cancer.

30. A process for treating cancer in an animal afflicted therewith comprising administering to said animal an amount of an immunogenic composition of claim 27 sufficient to elicit the production of cytotoxic T lymphocytes specific for the polypeptide of claim 11.

31. A process for treating cancer in an animal afflicted therewith comprising administering to said animal an amount of an immunogenic composition of claim 28 sufficient to elicit the production of cytotoxic T lymphocytes specific for the polypeptide of claim 12.

32. A process for treating a cancerous condition in an animal afflicted therewith comprising administering to said animal a therapeutically effective amount of an agent first identified as having anti-neoplastic activity using the process of claim 8.

33. A process for protecting an animal against cancer comprising administering to an animal at risk of developing cancer a therapeutically effective amount of an agent first identified as having anti-neoplastic activity using the process of claim 8.

34. The process of claim 30, 31, 32 or 33 wherein said animal is a human being.

35. The process of claim 30, 31, 32 or 33 wherein said cancer is breast cancer.

36. A method for producing test data with respect to the gene modulating activity of a compound comprising:
(a) contacting a compound with a cell containing a gene that corresponds to a polynucleotide having a sequence selected from the group consisting of polynucleotide sequences of SEQ ID NO: 1-81 and under conditions promoting the expression of said gene; and
(b) detecting a difference in expression of said gene relative to when said compound is not present
(c) and producing test data with respect to the gene modulating activity of said compound based on a decrease in the expression of the determined genes that correspond to SEQ ID NO: 1-81 indicating gene modulating action.

The application's sequence listing, which the Patent Office published only in electronic form, follows.

SEQUENCE LISTING (109 sequences)

SEQ ID NO: 1 - DNA, 5243 bp, Homo sapiens
atgttgtcggagtgaaaggtaagggggagcgagagcgccagagagagaagatcggggggctgaaatccatcttcatcctaccgctccgcccgtgttggtggaatgagcgttgcatgtgtcttgaagagaaaagcagtgctttggcaggactctttcagcccccacctgaaacatcaccctcaagaaccagctaatcccaacatgcctgttgttttgacatctggaacagggtcgcaagcgcagccacaaccagctgcaaatcaggctcttgcagctgggactcactccagccctgtcccaggatctataggagttgcaggccgttcccaggacgacgctatggtggactacttctttcagaggcagcatggtgagcagcttgggggaggaggaagtggaggaggcggctataataatagcaaacatcgatggcctactggggataacattcatgcagaacatcaggtgcgttccatggatgaactgaatcatgattttcaagcacttgctctggagggaagagcgatgggagagggcccaagggatgcagacagtgatgaaaacgacaaaggtgaaaagaagaacaagggtacgtttgatggagataagctaggagatttgaaggaggagggtgatgtgatggacaagaccaatggtttaccagtgcagaatgggattgatgcagacgtcaaagattttagccgtacccctggtaattgccagaactctgctaatgaagtggatcttctgggtccaaaccagaatggttctgagggcttagcccagctgaccagcaccaatggtgccaagcctgtggaggatttctccaacatggagtcccagagtgtccccttggaccccatggaacatgtgggcatggagcctcttcagtttgattattcaggcacgcaggtacctgtggactcagcagcagcaactgtgggactttttgactacaattctcaacaacagctgttccaaagacctaatgcgcttgctgtccagcagttgacagctgctcagcagcagcagtatgcactggcagctgctcatcagccgcacatcggtttagctcccgctgcgtttgtccccaatccatacatcatcagcgctgctcccccagggacggacccctacacagctggattggctgcagcagcgacactaggcccagctgtggtccctcaccagtattatggagttactccctggggagtctaccctgccagtcttttccagcagcaagctgccgctgccgctgcagcaactaattcagctaatcaacagaccaccccacaggctcagcaaggacagcagcaggttctccgtggaggagccagccaacgtcctttgaccccaaaccagaaccagcagggacagcaaacggatccccttgtggcagctgcagcagtgaattctgcccttgcatttggacaaggtctggcagcaggcatgccaggttatccggtgttggctcctgctgcttactatgaccaaactggtgcccttgtagtgaatgcaggcgcgagaaatggtcttggagctcctgttcgacttgtagctcctgccccagtcatcattagttcctcagctgcacaagcaggtgagcgcacatctgagtggactcctgccagagatctaaaagtggcgactgatagtgagattcttaaactgttgcagcagccgcagcttcagcaaatggagcagctggtggtcttgctggaacaacaaatggaccatttcgccctttaggaacacagcagcctcagccccagccccagcagcagcccaataacaacctggcatccagttctttctacggcaacaactctctgaacagcaattcacagagcagctccctcttctcccagggctctgcccagcctgccaacacatccttgggattcggaagtagcagttctctcggcgccaccctgggatccgcccttggagggtttggaacagcagttgcaaactccaacactggcagtggctcccgccgtgactccctgactggcagcagtgacctttataagaggacatcgagcagcttgacccccattggacacagtttttataacggccttagcttttcctcctctcctggacccgtgggcatgcctctccctagtcagggaccaggacattcacagacaccacctccttccctctcttcacatggatcctcttcaagcttaaacctgggaggactcacgaatggcagtggaagatacatctctgctgctccaggcgctgaagccaagtaccgcagtgcaagcagcgcctccagcctcttcagcccgagcagcactcttttctcttcctctcgtttgcgatatggaatgtctgatgtcatgccttctggcaggagcaggcttttggaagattttcgaaacaaccggtaccccaatttacaactgcgggagattgctggacatataatggaattttcccaagaccagcatgggtccagattcattcagctgaaactggagcgtgccacaccagctgagcgccagcttgtcttcaatgaaatcctccaggctgcctaccaactcatggtggatgtgtttggtaattacgtcattcagaagttctttgaatttggcagtcttgaacagaagctggctttggcagaacggattcgaggccacgtcctgtcattggcactacagatgtatggctgccgtgttatccagaaagctcttgagtttattccttcagaccagcagaatgagatggttcgggaactagatggccatgtcttgaagtgtgtgaaagatcagaatggcaatcacgtggttcagaaatgcattgaatgtgtacagccccagtctttgcaatttatcatcgatgcgtttaagggacaggtatttgccttatccacacatccttatggctgccgagtgattcagagaatcctggagcactgtctccctgaccagacactccctattttagaggagcttcaccagcacacagagcagcttgtacaggatcaatatggaaattatgtaatccaacatgtactggagcacggtcgtcctgaggataaaagcaaaattgtagcagaaatccgaggcaatgtacttgtattgagtcagcacaaatttgcaagcaatgttgtggagaagtgtgttactcacgcctcacgtacggagcgcgctgtgctcatcgatgaggtgtgcaccatgaacgacggtccccacagtgccttatacaccatgatgaaggaccagtatgccaactacgtggtccagaagatgattgacgtggcggagccaggccagcggaagatcgtcatgcataagatccggccccacatcgcaactcttcgtaagtacacctatggcaagcacattctggccaagctggagaagtactacatgaagaacggtgttgacttagggcccatctgtggcccccctaatggtatcatctgaggcagtgtcacccgctgttccctcattcccgctgacctcactggcccactggcaaatccaaccagcaaccagaaatgttctagtgtagagtctgagacgggcaagtggttgctccaggattactccctcctccaaaaaaggaatcaaatccacgagtggaaaagcctttgtaaatttaattttattacacataacatgtactattttttttaattgactaattgccctgctgttttactggtgtataggatacttgtacataggtaaccaatgtacatgggaggccacatattttgttcactgttgtatctatatttcacatgtggaaactttcagggtggttggtttaacaaaaaaaaaaagctttaaaaaaaaaagaaaaaaaggaaaaggtttttagctcatttgcctggccggcaagttttgcaaatagctcttccccacctcctcattttagtaaaaaacaaacaaaaacaaaaaaacctgagaagtttgaattgtagttaaatgaccccaaactggcatttaacactgtttataaaaaatatatatatatatatatatatataatgaaaaaggtttcagagttgctaaagcttcagtttgtgacattaagtttatgaaattctaaaaaatgccttttttggagactatattatgctgaagaaggctgttcgtgaggaggagatgcgagcacccagaacgtcttttgaggctgggcgggtgtgattgtttactgcctactggatttttttctattaacattgaaaggtaaaatctgattatttagcatgagaaaaaaaaatccaactctgcttttggtcttgcttctataaatatatagtgtatacttggtgtagactttgcatatatacaaatttgtagtattttcttgttttgatgtctaatctgtatctataatgtaccctagtagtcgaacatacttttgattgtacaattgtacatttgtatacctgtaatgtaaatgtggagaagtttgaatcaacataaacacgttttttggtaagaaaagagaattagccagccctgtgcattcagtgtatattctcaccttttatggtcgtagcatatagtgttgtatattgtaaattgtaatttcaaccagaagtaaatttttttcttttgaaggaataaatgttctttatacagcctagttaatgtttaaaaagaaaaaaatagcttggttttatttgtcatctagtctcaagtatagcgagattctttctaaatgttattcaagattgagttctcactagtgtttttttaatcctaaaaaagtaatgttttgattttgtgacagtcaaaaggacgtgcaaaagtctagccttgcccgagctttccttacaatcagagcccctctcaccttgtaaagtgtgaatcgcccttcccttttgtacagaagatgaactgtattttgcattttgtctacttgtaagtgaatgtaacatactgtcaattttccttgtttgaatatagaattgtaacactacacggtgtacatttccagagccttgtgtatatttccaatgaacttttttgcaagcacacttgtaaccatatgtgtataattaacaaacctgtgtatgcttatgcctgggcaactattttttgtaactcttgtgtagattgtctctaaacaatgtgtgatctttattttgaaaaatacagaactttggaatctgaaaaaaaaaaaaaaaaaaaaaaaamaamaaaaasaaaaaacaaaacaaaaacarrmaamaraaamaaacacaaaaraaarammaaaacacaacaaca

SEQ ID NO: 2 - DNA, 5146 bp, Homo sapiens
atgttgtcggagtgaaaggtaagggggagcgagagcgccagagagagaagatcggggggctgaaatccatcttcatcctaccgctccgcccgtgttggtggaatgagcgttgcatgtgtcttgaagagaaaagcagtgctttggcaggactctttcagcccccacctgaaacatcaccctcaagaaccagctaatcccaacatgcctgttgttttgacatctggaacagggtcgcaagcgcagccacaaccagctgcaaatcaggctcttgcagctgggactcactccagccctgtcccaggatctataggagttgcaggccgttcccaggacgacgctatggtggactacttctttcagaggcagcatggtgagcagcttgggggaggaggaagtggaggaggcggctataataatagcaaacatcgatggcctactggggataacattcatgcagaacatcaggtgcgttccatggatgaactgaatcatgattttcaagcacttgctctggagggaagagcgatgggagagggcccaagggatgcagacagtgatgaaaacgacaaaggtgaaaagaagaacaagggtacgtttgatggagataagctaggagatttgaaggaggagggtgatgtgatggacaagaccaatggtttaccagtgcagaatgggattgatgcagacgtcaaagattttagccgtacccctggtaattgccagaactctgctaatgaagtggatcttctgggtccaaaccagaatggttctgagggcttagcccagctgaccagcaccaatggtgccaagcctgtggaggatttctccaacatggagtcccagagtgtccccttggaccccatggaacatgtgggcatggagcctcttcagtttgattattcaggcacgcaggtacctgtggactcagcagcagcaactgtgggactttttgactacaattctcaacaacagctgttccaaagacctaatgcgcttgctgtccagcagttgacagctgctcagcagcagcagtatgcactggcagctgctcatcagccgcacatcggtttagctcccgctgcgtttgtccccaatccatacatcatcagcgctgctcccccagggacggacccctacacagctggattggctgcagcagcgacactaggcccagctgtggtccctcaccagtattatggagttactccctggggagtctaccctgccagtcttttccagcagcaagctgccgctgccgctgcagcaactaattcagctaatcaacagaccaccccacaggctcagcaaggacagcagcaggttctccgtggaggagccagccaacgtcctttgaccccaaaccagaaccagcagggacagcaaacggatccccttgtggcagctgcagcagtgaattctgcccttgcatttggacaaggtctggcagcaggcatgccaggttatccggtgttggctcctgctgcttactatgaccaaactggtgcccttgtagtgaatgcaggcgcgagaaatggtcttggagctcctgttcgacttgtagctcctgccccagtcatcattagttcctcagctgcacaagcaggtgagcgcacatctgagtggactcctgccagagatctaaaagtggcgactgatagtgagattcttaaactgttgcagcagccgcagcttcagcaaatggagcagctggtggtcttgctggaacaacaaatggaccatttcgccctttaggaacacagcagcctcagccccagccccagcagcagcccaataacaacctggcatccagttctttctacggcaacaactctctgaacagcaattcacagagcagctccctcttctcccagggctctgcccagcctgccaacacatccttgggattcggaagtagcagttctctcggcgccaccctgggatccgcccttggagggtttggaacagcagttgcaaactccaacactggcagtggctcccgccgtgactccctgactggcagcagtgacctttataagaggacatcgagcagcttgacccccattggacacagtttttataacggccttagcttttcctcctctcctggacccgtgggcatgcctctccctagtcagggaccaggacattcacagacaccacctccttccctctcttcacatggatcctcttcaagcttaaacctgggaggactcacgaatggcagtggaagatacatctctgctgctccaggcgctgaagccaagtaccgcagtgcaagcagcgcctccagcctcttcagcccgagcagcactcttttctcttcctctcgtttgcgatatggaatgtctgatgtcatgccttctggcaggagcaggcttttggaagattttcgaaacaaccggtaccccaatttacaactgcgggagattgctggacatataatggaattttcccaagaccagcatgggtccagattcattcagctgaaactggagcgtgccacaccagctgagcgccagcttgtcttcaatgaaatcctccaggctgcctaccaactcatggtggatgtgtttggtaattacgtcattcagaagttctttgaatttggcagtcttgaacagaagctggctttggcagaacggattcgaggccacgtcctgtcattggcactacagatgtatggctgccgtgttatccagaaagctcttgagtttattccttcagaccagcagaatgagatggttcgggaactagatggccatgtcttgaagtgtgtgaaagatcagaatggcaatcacgtggttcagaaatgcattgaatgtgtacagccccagtctttgcaatttatcatcgatgcgtttaagggacaggtatttgccttatccacacatccttatggctgccgagtgattcagagaatcctggagcactgtctccctgaccagacactccctattttagaggagcttcaccagcacacagagcagcttgtacaggatcaatatggaaattatgtaatccaacatgtactggagcacggtcgtcctgaggataaaagcaaaattgtagcagaaatccgaggcaatgtacttgtattgagtcagcacaaatttgcaagcaatgttgtggagaagtgtgttactcacgcctcacgtacggagcgcgctgtgctcatcgatgaggtgtgcaccatgaacgacggtccccacagtgccttatacaccatgatgaaggaccagtatgccaactacgtggtccagaagatgattgacgtggcggagccaggccagcggaagatcgtcatgcataagatccggccccacatcgcaactcttcgtaagtacacctatggcaagcacattctggccaagctggagaagtactacatgaagaacggtgttgacttagggcccatctgtggcccccctaatggtatcatctgaggcagtgtcacccgctgttccctcattcccgctgacctcactggcccactggcaaatccaaccagcaaccagaaatgttctagtgtagagtctgagacgggcaagtggttgctccaggattactccctcctccaaaaaaggaatcaaatccacgagtggaaaagcctttgtaaatttaattttattacacataacatgtactattttttttaattgactaattgccctgctgttttactggtgtataggatacttgtacataggtaaccaatgtacatgggaggccacatattttgttcactgttgtatctatatttcacatgtggaaactttcagggtggttggtttaacaaaaaaaaaaagctttaaaaaaaaaagaaaaaaaggaaaaggtttttagctcatttgcctggccggcaagttttgcaaatagctcttccccacctcctcattttagtaaaaaacaaacaaaaacaaaaaaacctgagaagtttgaattgtagttaaatgaccccaaactggcatttaacactgtttataaaaaatatatatatatatatatatatataatgaaaaaggtttcagagttgctaaagcttcagtttgtgacattaagtttatgaaattctaaaaaatgccttttttggagactatattatgctgaagaaggctgttcgtgaggaggagatgcgagcacccagaacgtcttttgaggctgggcgggtgtgattgtttactgcctactggatttttttctattaacattgaaaggtaaaatctgattatttagcatgagaaaaaaaaatccaactctgcttttggtcttgcttctataaatatatagtgtatacttggtgtagactttgcatatatacaaatttgtagtattttcttgttttgatgtctaatctgtatctataatgtaccctagtagtcgaacatacttttgattgtacaattgtacatttgtatacctgtaatgtaaatgtggagaagtttgaatcaacataaacacgttttttggtaagaaaagagaattagccagccctgtgcattcagtgtatattctcaccttttatggtcgtagcatatagtgttgtatattgtaaattgtaatttcaaccagaagtaaatttttttcttttgaaggaataaatgttctttatacagcctagttaatgtttaaaaagaaaaaaatagcttggttttatttgtcatctagtctcaagtatagcgagattctttctaaatgttattcaagattgagttctcactagtgtttttttaatcctaaaaaagtaatgttttgattttgtgacagtcaaaaggacgtgcaaaagtctagccttgcccgagctttccttacaatcagagcccctctcaccttgtaaagtgtgaatcgcccttcccttttgtacagaagatgaactgtattttgcattttgtctacttgtaagtgaatgtaacatactgtcaattttccttgtttgaatatagaattgtaacactacacggtgtacatttccagagccttgtgtatatttccaatgaacttttttgcaagcacacttgtaaccatatgtgtataattaacaaacctgtgtatgcttatgcctgggcaactattttttgtaactcttgtgtagattgtctctaaacaatgtgtgatctttattttgaaaaatacagaactttggaatctg

SEQ ID NO: 3 - DNA, 4944 bp, Homo sapiens
atgttgtcggagtgaaaggtaagggggagcgagagcgccagagagagaagatcggggggctgaaatccatcttcatcctaccgctccgcccgtgttggtggaatgagcgttgcatgtgtcttgaagagaaaagcagtgctttggcaggactctttcagcccccacctgaaacatcaccctcaagaaccagctaatcccaacatgcctgttgttttgacatctggaacagggtcgcaagcgcagccacaaccagctgcaaatcaggctcttgcagctgggactcactccagccctgtcccaggatctataggagttgcaggccgttcccaggacgacgctatggtggactacttctttcagaggcagcatggtgagcagcttgggggaggaggaagtggaggaggcggctataataatagcaaacatcgatggcctactggggataacattcatgcagaacatcaggtgcgttccatggatgaactgaatcatgattttcaagcacttgctctggagggaagagcgatgggagagggcccaagggatgcagacagtgatgaaaacgacaaaggtgaaaagaagaacaagggtacgtttgatggagataagctaggagatttgaaggaggagggtgatgtgatggacaagaccaatggtttaccagtgcagaatgggattgatgcagacgtcaaagattttagccgtacccctggtaattgccagaactctgctaatgaagtggatcttctgggtccaaaccagaatggttctgagggcttagcccagctgaccagcaccaatggtgccaagcctgtggaggatttctccaacatggagtcccagagtgtccccttggaccccatggaacatgtgggcatggagcctcttcagtttgattattcaggcacgcaggtacctgtggactcagcagcagcaactgtgggactttttgactacaattctcaacaacagctgttccaaagacctaatgcgcttgctgtccagcagttgacagctgctcagcagcagcagtatgcactggcagctgctcatcagccgcacatcggtttagctcccgctgcgtttgtccccaatccatacatcatcagcgctgctcccccagggacggacccctacacagctggattggctgcagcagcgacactaggcccagctgtggtccctcaccagtattatggagttactccctggggagtctaccctgccagtcttttccagcagcaagctgccgctgccgctgcagcaactaattcagctaatcaacagaccaccccacaggctcagcaaggacagcagcaggttctccgtggaggagccagccaacgtcctttgaccccaaaccagaaccagcagggacagcaaacggatccccttgtggcagctgcagcagtgaattctgcccttgcatttggacaaggtctggcagcaggcatgccaggttatccggtgttggctcctgctgcttactatgaccaaactggtgcccttgtagtgaatgcaggcgcgagaaatggtcttggagctcctgttcgacttgtagctcctgccccagtcatcattagttcctcagctgcacaagcaggtgagcgcacatctgagtggactcctgccagagatctaaaagtggcgactgatagtgagattcttaaactgttgcagcagccgcagcttcagcaaatggagcagctggtggtcttgctggaacaacaaatggaccatttcgccctttaggaacacagcagcctcagccccagccccagcagcagcccaataacaacctggcatccagttctttctacggcaacaactctctgaacagcaattcacagagcagctccctcttctcccagggctctgcccagcctgccaacacatccttgggattcggaagtagcagttctctcggcgccaccctgggatccgcccttggagggtttggaacagcagttgcaaactccaacactggcagtggctcccgccgtgactccctgactggcagcagtgacctttataagaggacatcgagcagcttgacccccattggacacagtttttataacggccttagcttttcctcctctcctggacccgtgggcatgcctctccctagtcagggaccaggacattcacagacaccacctccttccctctcttcacatggatcctcttcaagcttaaacctgggaggactcacgaatggcagtggaagatacatctctgctgctccaggcgctgaagccaagtaccgcagtgcaagcagcgcctccagcctcttcagcccgagcagcactcttttctcttcctctcgtttgcgatatggaatgtctgatgtcatgccttctggcaggagcaggcttttggaagattttcgaaacaaccggtaccccaatttacaactgcgggagattgctggacatataatggaattttcccaagaccagcatgggtccagattcattcagctgaaactggagcgtgccacaccagctgagcgccagcttgtcttcaatgaaatcctccaggctgcctaccaactcatggtggatgtgtttggtaattacgtcattcagaagttctttgaatttggcagtcttgaacagaagctggctttggcagaacggattcgaggccacgtcctgtcattggcactacagatgtatggctgccgtgttatccagaaagctcttgagtttattccttcagaccagcagaatgagatggttcgggaactagatggccatgtcttgaagtgtgtgaaagatcagaatggcaatcacgtggttcagaaatgcattgaatgtgtacagccccagtctttgcaatttatcatcgatgcgtttaagggacaggtatttgccttatccacacatccttatggctgccgagtgattcagagaatcctggagcactgtctccctgaccagacactccctattttagaggagcttcaccagcacacagagcagcttgtacaggatcaatatggaaattatgtaatccaacatgtactggagcacggtcgtcctgaggataaaagcaaaattgtagcagaaatccgaggcaatgtacttgtattgagtcagcacaaatttgcaagcaatgttgtggagaagtgtgttactcacgcctcacgtacggagcgcgctgtgctcatcgatgaggtgtgcaccatgaacgacggtccccacagtgccttatacaccatgatgaaggaccagtatgccaactacgtggtccagaagatgattgacgtggcggagccaggccagcggaagatcgtcatgcataagatccggccccacatcgcaactcttcgtaagtacacctatggcaagcacattctggccaagctggagaagtactacatgaagaacggtgttgacttagggcccatctgtggcccccctaatggtatcatctgaggcagtgtcacccgctgttccctcattcccgctgacctcactggcccactggcaaatccaaccagcaaccagaaatgttctagtgtagagtctgagacgggcaagtggttgctccaggattactccctcctccaaaaaaggaatcaaatccacgagtggaaaagcctttgtaaatttaattttattacacataacatgtactattttttttaattgactaattgccctgctgttttactggtgtataggatacttgtacataggtaaccaatgtacatgggaggccacatattttgttcactgttgtatctatatttcacatgtggaaactttcagggtggttggtttaacaaaaaaaaaaagctttaaaaaaaaaagaaaaaaaggaaaaggtttttagctcatttgcctggccggcaagttttgcaaatagctcttccccacctcctcattttagtaaaaaacaaacaaaaacaaaaaaacctgagaagtttgaattgtagttaaatgaccccaaactggcatttaacactgtttataaaaaatatatatatatatatatatatataatgaaaaaggtttcagagttgctaaagcttcagtttgtgacattaagtttatgaaattctaaaaaatgccttttttggagactatattatgctgaagaaggctgttcgtgaggaggagatgcgagcacccagaacgtcttttgaggctgggcgggtgtgattgtttactgcctactggatttttttctattaacattgaaaggtaaaatctgattatttagcatgagaaaaaaaaatccaactctgcttttggtcttgcttctataaatatatagtgtatacttggtgtagactttgcatatatacaaatttgtagtattttcttgttttgatgtctaatctgtatctataatgtaccctagtagtcgaacatacttttgattgtacaattgtacatttgtatacctgtaatgtaaatgtggagaagtttgaatcaacataaacacgttttttggtaagaaaagagaattagccagccctgtgcattcagtgtatattctcaccttttatggtcgtagcatatagtgttgtatattgtaaattgtaatttcaaccagaagtaaatttttttcttttgaaggaataaatgttctttatacagcctagttaatgtttaaaaagaaaaaaatagcttggttttatttgtcatctagtctcaagtatagcgagattctttctaaatgttattcaagattgagttctcactagtgtttttttaatcctaaaaaagtaatgttttgattttgtgacagtcaaaaggacgtgcaaaagtctagccttgcccgagctttccttacaatcagagcccctctcaccttgtaaaaaacctgtgtatgcttatgcctgggcaactattttttgtaactcttgtgtagattgtctctaaacaatgtgtgatctttattttgaaaaatacagaactttggaatctg

SEQ ID NO: 4 - DNA, 5094 bp, Homo sapiens
atgttgtcggagtgaaaggtaagggggagcgagagcgccagagagagaagatcggggggctgaaatccatcttcatcctaccgctccgcccgtgttggtggaatgagcgttgcatgtgtcttgaagagaaaagcagtgctttggcaggactctttcagcccccacctgaaacatcaccctcaagaaccagctaatcccaacatgcctgttgttttgacatctggaacagggtcgcaagcgcagccacaaccagctgcaaatcaggctcttgcagctgggactcactccagccctgtcccaggatctataggagttgcaggccgttcccaggacgacgctatggtggactacttctttcagaggcagcatggtgagcagcttgggggaggaggaagtggaggaggcggctataataatagcaaacatcgatggcctactggggataacattcatgcagaacatcaggtgcgttccatggatgaactgaatcatgattttcaagcacttgctctggagggaagagcgatgggagagggcccaagggatgcagacagtgatgaaaacgacaaaggtgaaaagaagaacaagggtacgtttgatggagataagctaggagatttgaaggaggagggtgatgtgatggacaagaccaatggtttaccagtgcagaatgggattgatgcagacgtcaaagattttagccgtacccctggtaattgccagaactctgctaatgaagtggatcttctgggtccaaaccagaatggttctgagggcttagcccagctgaccagcaccaatggtgccaagcctgtggaggatttctccaacatggagtcccagagtgtccccttggaccccatggaacatgtgggcatggagcctcttcagtttgattattcaggcacgcaggtacctgtggactcagcagcagcaactgtgggactttttgactacaattctcaacaacagctgttccaaagacctaatgcgcttgctgtccagcagttgacagctgctcagcagcagcagtatgcactggcagctgctcatcagccgcacatcggtttagctcccgctgcgtttgtccccaatccatacatcatcagcgctgctcccccagggacggacccctacacagctggattggctgcagcagcgacactaggcccagctgtggtccctcaccagtattatggagttactccctggggagtctaccctgccagtcttttccagcagcaagctgccgctgccgctgcagcaactaattcagctaatcaacagaccaccccacaggctcagcaaggacagcagcaggttctccgtggaggagccagccaacgtcctttgaccccaaaccagaaccagcagggacagcaaacggatccccttgtggcagctgcagcagtgaattctgcccttgcatttggacaaggtctggcagcaggcatgccaggttatccggtgttggctcctgctgcttactatgaccaaactggtgcccttgtagtgaatgcaggcgcgagaaatggtcttggagctcctgttcgacttgtagctcctgccccagtcatcattagttcctcagctgcacaagcaggaacacagcagcctcagccccagccccagcagcagcccaataacaacctggcatccagttctttctacggcaacaactctctgaacagcaattcacagagcagctccctcttctcccagggctctgcccagcctgccaacacatccttgggattcggaagtagcagttctctcggcgccaccctgggatccgcccttggagggtttggaacagcagttgcaaactccaacactggcagtggctcccgccgtgactccctgactggcagcagtgacctttataagaggacatcgagcagcttgacccccattggacacagtttttataacggccttagcttttcctcctctcctggacccgtgggcatgcctctccctagtcagggaccaggacattcacagacaccacctccttccctctcttcacatggatcctcttcaagcttaaacctgggaggactcacgaatggcagtggaagatacatctctgctgctccaggcgctgaagccaagtaccgcagtgcaagcagcgcctccagcctcttcagcccgagcagcactcttttctcttcctctcgtttgcgatatggaatgtctgatgtcatgccttctggcaggagcaggcttttggaagattttcgaaacaaccggtaccccaatttacaactgcgggagattgctggacatataatggaattttcccaagaccagcatgggtccagattcattcagctgaaactggagcgtgccacaccagctgagcgccagcttgtcttcaatgaaatcctccaggctgcctaccaactcatggtggatgtgtttggtaattacgtcattcagaagttctttgaatttggcagtcttgaacagaagctggctttggcagaacggattcgaggccacgtcctgtcattggcactacagatgtatggctgccgtgttatccagaaagctcttgagtttattccttcagaccagcagaatgagatggttcgggaactagatggccatgtcttgaagtgtgtgaaagatcagaatggcaatcacgtggttcagaaatgcattgaatgtgtacagccccagtctttgcaatttatcatcgatgcgtttaagggacaggtatttgccttatccacacatccttatggctgccgagtgattcagagaatcctggagcactgtctccctgaccagacactccctattttagaggagcttcaccagcacacagagcagcttgtacaggatcaatatggaaattatgtaatccaacatgtactggagcacggtcgtcctgaggataaaagcaaaattgtagcagaaatccgaggcaatgtacttgtattgagtcagcacaaatttgcaagcaatgttgtggagaagtgtgttactcacgcctcacgtacggagcgcgctgtgctcatcgatgaggtgtgcaccatgaacgacggtccccacagtgccttatacaccatgatgaaggaccagtatgccaactacgtggtccagaagatgattgacgtggcggagccaggccagcggaagatcgtcatgcataagatccggccccacatcgcaactcttcgtaagtacacctatggcaagcacattctggccaagctggagaagtactacatgaagaacggtgttgacttagggcccatctgtggcccccctaatggtatcatctgaggcagtgtcacccgctgttccctcattcccgctgacctcactggcccactggcaaatccaaccagcaaccagaaatgttctagtgtagagtctgagacgggcaagtggttgctccaggattactccctcctccaaaaaaggaatcaaatccacgagtggaaaagcctttgtaaatttaattttattacacataacatgtactattttttttaattgactaattgccctgctgttttactggtgtataggatacttgtacataggtaaccaatgtacatgggaggccacatattttgttcactgttgtatctatatttcacatgtggaaactttcagggtggttggtttaacaaaaaaaaaaagctttaaaaaaaaaagaaaaaaaggaaaaggtttttagctcatttgcctggccggcaagttttgcaaatagctcttccccacctcctcattttagtaaaaaacaaacaaaaacaaaaaaacctgagaagtttgaattgtagttaaatgaccccaaactggcatttaacactgtttataaaaaatatatatatatatatatatatataatgaaaaaggtttcagagttgctaaagcttcagtttgtgacattaagtttatgaaattctaaaaaatgccttttttggagactatattatgctgaagaaggctgttcgtgaggaggagatgcgagcacccagaacgtcttttgaggctgggcgggtgtgattgtttactgcctactggatttttttctattaacattgaaaggtaaaatctgattatttagcatgagaaaaaaaaatccaactctgcttttggtcttgcttctataaatatatagtgtatacttggtgtagactttgcatatatacaaatttgtagtattttcttgttttgatgtctaatctgtatctataatgtaccctagtagtcgaacatacttttgattgtacaattgtacatttgtatacctgtaatgtaaatgtggagaagtttgaatcaacataaacacgttttttggtaagaaaagagaattagccagccctgtgcattcagtgtatattctcaccttttatggtcgtagcatatagtgttgtatattgtaaattgtaatttcaaccagaagtaaatttttttcttttgaaggaataaatgttctttatacagcctagttaatgtttaaaaagaaaaaaatagcttggttttatttgtcatctagtctcaagtatagcgagattctttctaaatgttattcaagattgagttctcactagtgtttttttaatcctaaaaaagtaatgttttgattttgtgacagtcaaaaggacgtgcaaaagtctagccttgcccgagctttccttacaatcagagcccctctcaccttgtaaagtgtgaatcgcccttcccttttgtacagaagatgaactgtattttgcattttgtctacttgtaagtgaatgtaacatactgtcaattttccttgtttgaatatagaattgtaacactacacggtgtacatttccagagccttgtgtatatttccaatgaacttttttgcaagcacacttgtaaccatatgtgtataattaacaaacctgtgtatgcttatgcctgggcaactattttttgtaactcttgtgtagattgtctctaaacaatgtgtgatctttattttgaaaaatacagaactttggaatctgaaaaaaaaaaaaaaaaaaaaaaaamaamaaaaasaaaaaacaaaacaaaaacarrmaamaraaamaaacacaaaaraaarammaaaacacaacaaca

SEQ ID NO: 5 - DNA, 4997 bp, Homo sapiens
atgttgtcggagtgaaaggtaagggggagcgagagcgccagagagagaagatcggggggctgaaatccatcttcatcctaccgctccgcccgtgttggtggaatgagcgttgcatgtgtcttgaagagaaaagcagtgctttggcaggactctttcagcccccacctgaaacatcaccctcaagaaccagctaatcccaacatgcctgttgttttgacatctggaacagggtcgcaagcgcagccacaaccagctgcaaatcaggctcttgcagctgggactcactccagccctgtcccaggatctataggagttgcaggccgttcccaggacgacgctatggtggactacttctttcagaggcagcatggtgagcagcttgggggaggaggaagtggaggaggcggctataataatagcaaacatcgatggcctactggggataacattcatgcagaacatcaggtgcgttccatggatgaactgaatcatgattttcaagcacttgctctggagggaagagcgatgggagagggcccaagggatgcagacagtgatgaaaacgacaaaggtgaaaagaagaacaagggtacgtttgatggagataagctaggagatttgaaggaggagggtgatgtgatggacaagaccaatggtttaccagtgcagaatgggattgatgcagacgtcaaagattttagccgtacccctggtaattgccagaactctgctaatgaagtggatcttctgggtccaaaccagaatggttctgagggcttagcccagctgaccagcaccaatggtgccaagcctgtggaggatttctccaacatggagtcccagagtgtccccttggaccccatggaacatgtgggcatggagcctcttcagtttgattattcaggcacgcaggtacctgtggactcagcagcagcaactgtgggactttttgactacaattctcaacaacagctgttccaaagacctaatgcgcttgctgtccagcagttgacagctgctcagcagcagcagtatgcactggcagctgctcatcagccgcacatcggtttagctcccgctgcgtttgtccccaatccatacatcatcagcgctgctcccccagggacggacccctacacagctggattggctgcagcagcgacactaggcccagctgtggtccctcaccagtattatggagttactccctggggagtctaccctgccagtcttttccagcagcaagctgccgctgccgctgcagcaactaattcagctaatcaacagaccaccccacaggctcagcaaggacagcagcaggttctccgtggaggagccagccaacgtcctttgaccccaaaccagaaccagcagggacagcaaacggatccccttgtggcagctgcagcagtgaattctgcccttgcatttggacaaggtctggcagcaggcatgccaggttatccggtgttggctcctgctgcttactatgaccaaactggtgcccttgtagtgaatgcaggcgcgagaaatggtcttggagctcctgttcgacttgtagctcctgccccagtcatcattagttcctcagctgcacaagcaggaacacagcagcctcagccccagccccagcagcagcccaataacaacctggcatccagttctttctacggcaacaactctctgaacagcaattcacagagcagctccctcttctcccagggctctgcccagcctgccaacacatccttgggattcggaagtagcagttctctcggcgccaccctgggatccgcccttggagggtttggaacagcagttgcaaactccaacactggcagtggctcccgccgtgactccctgactggcagcagtgacctttataagaggacatcgagcagcttgacccccattggacacagtttttataacggccttagcttttcctcctctcctggacccgtgggcatgcctctccctagtcagggaccaggacattcacagacaccacctccttccctctcttcacatggatcctcttcaagcttaaacctgggaggactcacgaatggcagtggaagatacatctctgctgctccaggcgctgaagccaagtaccgcagtgcaagcagcgcctccagcctcttcagcccgagcagcactcttttctcttcctctcgtttgcgatatggaatgtctgatgtcatgccttctggcaggagcaggcttttggaagattttcgaaacaaccggtaccccaatttacaactgcgggagattgctggacatataatggaattttcccaagaccagcatgggtccagattcattcagctgaaactggagcgtgccacaccagctgagcgccagcttgtcttcaatgaaatcctccaggctgcctaccaactcatggtggatgtgtttggtaattacgtcattcagaagttctttgaatttggcagtcttgaacagaagctggctttggcagaacggattcgaggccacgtcctgtcattggcactacagatgtatggctgccgtgttatccagaaagctcttgagtttattccttcagaccagcagaatgagatggttcgggaactagatggccatgtcttgaagtgtgtgaaagatcagaatggcaatcacgtggttcagaaatgcattgaatgtgtacagccccagtctttgcaatttatcatcgatgcgtttaagggacaggtatttgccttatccacacatccttatggctgccgagtgattcagagaatcctggagcactgtctccctgaccagacactccctattttagaggagcttcaccagcacacagagcagcttgtacaggatcaatatggaaattatgtaatccaacatgtactggagcacggtcgtcctgaggataaaagcaaaattgtagcagaaatccgaggcaatgtacttgtattgagtcagcacaaatttgcaagcaatgttgtggagaagtgtgttactcacgcctcacgtacggagcgcgctgtgctcatcgatgaggtgtgcaccatgaacgacggtccccacagtgccttatacaccatgatgaaggaccagtatgccaactacgtggtccagaagatgattgacgtggcggagccaggccagcggaagatcgtcatgcataagatccggccccacatcgcaactcttcgtaagtacacctatggcaagcacattctggccaagctggagaagtactacatgaagaacggtgttgacttagggcccatctgtggcccccctaatggtatcatctgaggcagtgtcacccgctgttccctcattcccgctgacctcactggcccactggcaaatccaaccagcaaccagaaatgttctagtgtagagtctgagacgggcaagtggttgctccaggattactccctcctccaaaaaaggaatcaaatccacgagtggaaaagcctttgtaaatttaattttattacacataacatgtactattttttttaattgactaattgccctgctgttttactggtgtataggatacttgtacataggtaaccaatgtacatgggaggccacatattttgttcactgttgtatctatatttcacatgtggaaactttcagggtggttggtttaacaaaaaaaaaaagctttaaaaaaaaaagaaaaaaaggaaaaggtttttagctcatttgcctggccggcaagttttgcaaatagctcttccccacctcctcattttagtaaaaaacaaacaaaaacaaaaaaacctgagaagtttgaattgtagttaaatgaccccaaactggcatttaacactgtttataaaaaatatatatatatatatatatatataatgaaaaaggtttcagagttgctaaagcttcagtttgtgacattaagtttatgaaattctaaaaaatgccttttttggagactatattatgctgaagaaggctgttcgtgaggaggagatgcgagcacccagaacgtcttttgaggctgggcgggtgtgattgtttactgcctactggatttttttctattaacattgaaaggtaaaatctgattatttagcatgagaaaaaaaaatccaactctgcttttggtcttgcttctataaatatatagtgtatacttggtgtagactttgcatatatacaaatttgtagtattttcttgttttgatgtctaatctgtatctataatgtaccctagtagtcgaacatacttttgattgtacaattgtacatttgtatacctgtaatgtaaatgtggagaagtttgaatcaacataaacacgttttttggtaagaaaagagaattagccagccctgtgcattcagtgtatattctcaccttttatggtcgtagcatatagtgttgtatattgtaaattgtaatttcaaccagaagtaaatttttttcttttgaaggaataaatgttctttatacagcctagttaatgtttaaaaagaaaaaaatagcttggttttatttgtcatctagtctcaagtatagcgagattctttctaaatgttattcaagattgagttctcactagtgtttttttaatcctaaaaaagtaatgttttgattttgtgacagtcaaaaggacgtgcaaaagtctagccttgcccgagctttccttacaatcagagcccctctcaccttgtaaagtgtgaatcgcccttcccttttgtacagaagatgaactgtattttgcattttgtctacttgtaagtgaatgtaacatactgtcaattttccttgtttgaatatagaattgtaacactacacggtgtacatttccagagccttgtgtatatttccaatgaacttttttgcaagcacacttgtaaccatatgtgtataattaacaaacctgtgtatgcttatgcctgggcaactattttttgtaactcttgtgtagattgtctctaaacaatgtgtgatctttattttgaaaaatacagaactttggaatctg

SEQ ID NO: 6 - DNA, 4795 bp, Homo sapiens
atgttgtcggagtgaaaggtaagggggagcgagagcgccagagagagaagatcggggggctgaaatccatcttcatcctaccgctccgcccgtgttggtggaatgagcgttgcatgtgtcttgaagagaaaagcagtgctttggcaggactctttcagcccccacctgaaacatcaccctcaagaaccagctaatcccaacatgcctgttgttttgacatctggaacagggtcgcaagcgcagccacaaccagctgcaaatcaggctcttgcagctgggactcactccagccctgtcccaggatctataggagttgcaggccgttcccaggacgacgctatggtggactacttctttcagaggcagcatggtgagcagcttgggggaggaggaagtggaggaggcggctataataatagcaaacatcgatggcctactggggataacattcatgcagaacatcaggtgcgttccatggatgaactgaatcatgattttcaagcacttgctctggagggaagagcgatgggagagggcccaagggatgcagacagtgatgaaaacgacaaaggtgaaaagaagaacaagggtacgtttgatggagataagctaggagatttgaaggaggagggtgatgtgatggacaagaccaatggtttaccagtgcagaatgggattgatgcagacgtcaaagattttagccgtacccctggtaattgccagaactctgctaatgaagtggatcttctgggtccaaaccagaatggttctgagggcttagcccagctgaccagcaccaatggtgccaagcctgtggaggatttctccaacatggagtcccagagtgtccccttggaccccatggaacatgtgggcatggagcctcttcagtttgattattcaggcacgcaggtacctgtggactcagcagcagcaactgtgggactttttgactacaattctcaacaacagctgttccaaagacctaatgcgcttgctgtccagcagttgacagctgctcagcagcagcagtatgcactggcagctgctcatcagccgcacatcggtttagctcccgctgcgtttgtccccaatccatacatcatcagcgctgctcccccagggacggacccctacacagctggattggctgcagcagcgacactaggcccagctgtggtccctcaccagtattatggagttactccctggggagtctaccctgccagtcttttccagcagcaagctgccgctgccgctgcagcaactaattcagctaatcaacagaccaccccacaggctcagcaaggacagcagcaggttctccgtggaggagccagccaacgtcctttgaccccaaaccagaaccagcagggacagcaaacggatccccttgtggcagctgcagcagtgaattctgcccttgcatttggacaaggtctggcagcaggcatgccaggttatccggtgttggctcctgctgcttactatgaccaaactggtgcccttgtagtgaatgcaggcgcgagaaatggtcttggagctcctgttcgacttgtagctcctgccccagtcatcattagttcctcagctgcacaagcaggaacacagcagcctcagccccagccccagcagcagcccaataacaacctggcatccagttctttctacggcaacaactctctgaacagcaattcacagagcagctccctcttctcccagggctctgcccagcctgccaacacatccttgggattcggaagtagcagttctctcggcgccaccctgggatccgcccttggagggtttggaacagcagttgcaaactccaacactggcagtggctcccgccgtgactccctgactggcagcagtgacctttataagaggacatcgagcagcttgacccccattggacacagtttttataacggccttagcttttcctcctctcctggacccgtgggcatgcctctccctagtcagggaccaggacattcacagacaccacctccttccctctcttcacatggatcctcttcaagcttaaacctgggaggactcacgaatggcagtggaagatacatctctgctgctccaggcgctgaagccaagtaccgcagtgcaagcagcgcctccagcctcttcagcccgagcagcactcttttctcttcctctcgtttgcgatatggaatgtctgatgtcatgccttctggcaggagcaggcttttggaagattttcgaaacaaccggtaccccaatttacaactgcgggagattgctggacatataatggaattttcccaagaccagcatgggtccagattcattcagctgaaactggagcgtgccacaccagctgagcgccagcttgtcttcaatgaaatcctccaggctgcctaccaactcatggtggatgtgtttggtaattacgtcattcagaagttctttgaatttggcagtcttgaacagaagctggctttggcagaacggattcgaggccacgtcctgtcattggcactacagatgtatggctgccgtgttatccagaaagctcttgagtttattccttcagaccagcagaatgagatggttcgggaactagatggccatgtcttgaagtgtgtgaaagatcagaatggcaatcacgtggttcagaaatgcattgaatgtgtacagccccagtctttgcaatttatcatcgatgcgtttaagggacaggtatttgccttatccacacatccttatggctgccgagtgattcagagaatcctggagcactgtctccctgaccagacactccctattttagaggagcttcaccagcacacagagcagcttgtacaggatcaatatggaaattatgtaatccaacatgtactggagcacggtcgtcctgaggataaaagcaaaattgtagcagaaatccgaggcaatgtacttgtattgagtcagcacaaatttgcaagcaatgttgtggagaagtgtgttactcacgcctcacgtacggagcgcgctgtgctcatcgatgaggtgtgcaccatgaacgacggtccccacagtgccttatacaccatgatgaaggaccagtatgccaactacgtggtccagaagatgattgacgtggcggagccaggccagcggaagatcgtcatgcataagatccggccccacatcgcaactcttcgtaagtacacctatggcaagcacattctggccaagctggagaagtactacatgaagaacggtgttgacttagggcccatctgtggcccccctaatggtatcatctgaggcagtgtcacccgctgttccctcattcccgctgacctcactggcccactggcaaatccaaccagcaaccagaaatgttctagtgtagagtctgagacgggcaagtggttgctccaggattactccctcctccaaaaaaggaatcaaatccacgagtggaaaagcctttgtaaatttaattttattacacataacatgtactattttttttaattgactaattgccctgctgttttactggtgtataggatacttgtacataggtaaccaatgtacatgggaggccacatattttgttcactgttgtatctatatttcacatgtggaaactttcagggtggttggtttaacaaaaaaaaaaagctttaaaaaaaaaagaaaaaaaggaaaaggtttttagctcatttgcctggccggcaagttttgcaaatagctcttccccacctcctcattttagtaaaaaacaaacaaaaacaaaaaaacctgagaagtttgaattgtagttaaatgaccccaaactggcatttaacactgtttataaaaaatatatatatatatatatatatataatgaaaaaggtttcagagttgctaaagcttcagtttgtgacattaagtttatgaaattctaaaaaatgccttttttggagactatattatgctgaagaaggctgttcgtgaggaggagatgcgagcacccagaacgtcttttgaggctgggcgggtgtgattgtttactgcctactggatttttttctattaacattgaaaggtaaaatctgattatttagcatgagaaaaaaaaatccaactctgcttttggtcttgcttctataaatatatagtgtatacttggtgtagactttgcatatatacaaatttgtagtattttcttgttttgatgtctaatctgtatctataatgtaccctagtagtcgaacatacttttgattgtacaattgtacatttgtatacctgtaatgtaaatgtggagaagtttgaatcaacataaacacgttttttggtaagaaaagagaattagccagccctgtgcattcagtgtatattctcaccttttatggtcgtagcatatagtgttgtatattgtaaattgtaatttcaaccagaagtaaatttttttcttttgaaggaataaatgttctttatacagcctagttaatgtttaaaaagaaaaaaatagcttggttttatttgtcatctagtctcaagtatagcgagattctttctaaatgttattcaagattgagttctcactagtgtttttttaatcctaaaaaagtaatgttttgattttgtgacagtcaaaaggacgtgcaaaagtctagccttgcccgagctttccttacaatcagagcccctctcaccttgtaaaaaacctgtgtatgcttatgcctgggcaactattttttgtaactcttgtgtagattgtctctaaacaatgtgtgatctttattttgaaaaatacagaactttggaatctg

SEQ ID NO: 7 - DNA, 4992 bp, Homo sapiens
atgttgtcggagtgaaaggtaagggggagcgagagcgccagagagagaagatcggggggctgaaatccatcttcatcctaccgctccgcccgtgttggtggaatgagcgttgcatgtgtcttgaagagaaaagcagtgctttggcaggactctttcagcccccacctgaaacatcaccctcaagaaccagctaatcccaacatgcctgttgttttgacatctggaacagggtcgcaagcgcagccacaaccagctgcaaatcaggctcttgcagctgggactcactccagccctgtcccaggatctataggagttgcaggccgttcccaggacgacgctatggtggactacttctttcagaggcagcatggtgagcagcttgggggaggaggaagtggaggaggcggctataataatagcaaacatcgatggcctactggggataacattcatgcagaacatcaggtgcgttccatggatgaactgaatcatgattttcaagcacttgctctggagggaagagcgatgggagagggcccaagggatgcagacagtgatgaaaacgacaaaggtgaaaagaagaacaagggtacgtttgatggagataagctaggagatttgaaggaggagggtgatgtgatggacaagaccaatggtttaccagtgcagaatgggattgatgcagacgtcaaagattttagccgtacccctggtaattgccagaactctgctaatgaagtggatcttctgggtccaaaccagaatggttctgagggcttagcccagctgaccagcaccaatggtgccaagcctgtggaggatttctccaacatggagtcccagagtgtccccttggaccccatggaacatgtgggcatggagcctcttcagtttgattattcaggcacgcaggtacctgtggactcagcagcagcaactgtgggactttttgactacaattctcaacaacagctgttccaaagacctaatgcgcttgctgtccagcagttgacagctgctcagcagcagcagtatgcactggcagctgctcatcagccgcacatcggcccagctgtggtccctcaccagtattatggagttactccctggggagtctaccctgccagtcttttccagcagcaagctgccgctgccgctgcagcaactaattcagctaatcaacagaccaccccacaggctcagcaaggacagcagcaggttctccgtggaggagccagccaacgtcctttgaccccaaaccagaaccagcagggacagcaaacggatccccttgtggcagctgcagcagtgaattctgcccttgcatttggacaaggtctggcagcaggcatgccaggttatccggtgttggctcctgctgcttactatgaccaaactggtgcccttgtagtgaatgcaggcgcgagaaatggtcttggagctcctgttcgacttgtagctcctgccccagtcatcattagttcctcagctgcacaagcaggaacacagcagcctcagccccagccccagcagcagcccaataacaacctggcatccagttctttctacggcaacaactctctgaacagcaattcacagagcagctccctcttctcccagggctctgcccagcctgccaacacatccttgggattcggaagtagcagttctctcggcgccaccctgggatccgcccttggagggtttggaacagcagttgcaaactccaacactggcagtggctcccgccgtgactccctgactggcagcagtgacctttataagaggacatcgagcagcttgacccccattggacacagtttttataacggccttagcttttcctcctctcctggacccgtgggcatgcctctccctagtcagggaccaggacattcacagacaccacctccttccctctcttcacatggatcctcttcaagcttaaacctgggaggactcacgaatggcagtggaagatacatctctgctgctccaggcgctgaagccaagtaccgcagtgcaagcagcgcctccagcctcttcagcccgagcagcactcttttctcttcctctcgtttgcgatatggaatgtctgatgtcatgccttctggcaggagcaggcttttggaagattttcgaaacaaccggtaccccaatttacaactgcgggagattgctggacatataatggaattttcccaagaccagcatgggtccagattcattcagctgaaactggagcgtgccacaccagctgagcgccagcttgtcttcaatgaaatcctccaggctgcctaccaactcatggtggatgtgtttggtaattacgtcattcagaagttctttgaatttggcagtcttgaacagaagctggctttggcagaacggattcgaggccacgtcctgtcattggcactacagatgtatggctgccgtgttatccagaaagctcttgagtttattccttcagaccagcagaatgagatggttcgggaactagatggccatgtcttgaagtgtgtgaaagatcagaatggcaatcacgtggttcagaaatgcattgaatgtgtacagccccagtctttgcaatttatcatcgatgcgtttaagggacaggtatttgccttatccacacatccttatggctgccgagtgattcagagaatcctggagcactgtctccctgaccagacactccctattttagaggagcttcaccagcacacagagcagcttgtacaggatcaatatggaaattatgtaatccaacatgtactggagcacggtcgtcctgaggataaaagcaaaattgtagcagaaatccgaggcaatgtacttgtattgagtcagcacaaatttgcaagcaatgttgtggagaagtgtgttactcacgcctcacgtacggagcgcgctgtgctcatcgatgaggtgtgcaccatgaacgacggtccccacagtgccttatacaccatgatgaaggaccagtatgccaactacgtggtccagaagatgattgacgtggcggagccaggccagcggaagatcgtcatgcataagatccggccccacatcgcaactcttcgtaagtacacctatggcaagcacattctggccaagctggagaagtactacatgaagaacggtgttgacttagggcccatctgtggcccccctaatggtatcatctgaggcagtgtcacccgctgttccctcattcccgctgacctcactggcccactggcaaatccaaccagcaaccagaaatgttctagtgtagagtctgagacgggcaagtggttgctccaggattactccctcctccaaaaaaggaatcaaatccacgagtggaaaagcctttgtaaatttaattttattacacataacatgtactattttttttaattgactaattgccctgctgttttactggtgtataggatacttgtacataggtaaccaatgtacatgggaggccacatattttgttcactgttgtatctatatttcacatgtggaaactttcagggtggttggtttaacaaaaaaaaaaagctttaaaaaaaaaagaaaaaaaggaaaaggtttttagctcatttgcctggccggcaagttttgcaaatagctcttccccacctcctcattttagtaaaaaacaaacaaaaacaaaaaaacctgagaagtttgaattgtagttaaatgaccccaaactggcatttaacactgtttataaaaaatatatatatatatatatatatataatgaaaaaggtttcagagttgctaaagcttcagtttgtgacattaagtttatgaaattctaaaaaatgccttttttggagactatattatgctgaagaaggctgttcgtgaggaggagatgcgagcacccagaacgtcttttgaggctgggcgggtgtgattgtttactgcctactggatttttttctattaacattgaaaggtaaaatctgattatttagcatgagaaaaaaaaatccaactctgcttttggtcttgcttctataaatatatagtgtatacttggtgtagactttgcatatatacaaatttgtagtattttcttgttttgatgtctaatctgtatctataatgtaccctagtagtcgaacatacttttgattgtacaattgtacatttgtatacctgtaatgtaaatgtggagaagtttgaatcaacataaacacgttttttggtaagaaaagagaattagccagccctgtgcattcagtgtatattctcaccttttatggtcgtagcatatagtgttgtatattgtaaattgtaatttcaaccagaagtaaatttttttcttttgaaggaataaatgttctttatacagcctagttaatgtttaaaaagaaaaaaatagcttggttttatttgtcatctagtctcaagtatagcgagattctttctaaatgttattcaagattgagttctcactagtgtttttttaatcctaaaaaagtaatgttttgattttgtgacagtcaaaaggacgtgcaaaagtctagccttgcccgagctttccttacaatcagagcccctctcaccttgtaaagtgtgaatcgcccttcccttttgtacagaagatgaactgtattttgcattttgtctacttgtaagtgaatgtaacatactgtcaattttccttgtttgaatatagaattgtaacactacacggtgtacatttccagagccttgtgtatatttccaatgaacttttttgcaagcacacttgtaaccatatgtgtataattaacaaacctgtgtatgcttatgcctgggcaactattttttgtaactcttgtgtagattgtctctaaacaatgtgtgatctttattttgaaaaatacagaactttggaatctgaaaaaaaaaaaaaaaaaaaaaaaamaamaaaaasaaaaaacaaaacaaaaacarrmaamaraaamaaacacaaaaraaarammaaaacacaacaaca

SEQ ID NO: 8 - DNA, 4895 bp, Homo sapiens
atgttgtcggagtgaaaggtaagggggagcgagagcgccagagagagaagatcggggggctgaaatccatcttcatcctaccgctccgcccgtgttggtggaatgagcgttgcatgtgtcttgaagagaaaagcagtgctttggcaggactctttcagcccccacctgaaacatcaccctcaagaaccagctaatcccaacatgcctgttgttttgacatctggaacagggtcgcaagcgcagccacaaccagctgcaaatcaggctcttgcagctgggactcactccagccctgtcccaggatctataggagttgcaggccgttcccaggacgacgctatggtggactacttctttcagaggcagcatggtgagcagcttgggggaggaggaagtggaggaggcggctataataatagcaaacatcgatggcctactggggataacattcatgcagaacatcaggtgcgttccatggatgaactgaatcatgattttcaagcacttgctctggagggaagagcgatgggagagggcccaagggatgcagacagtgatgaaaacgacaaaggtgaaaagaagaacaagggtacgtttgatggagataagctaggagatttgaaggaggagggtgatgtgatggacaagaccaatggtttaccagtgcagaatgggattgatgcagacgtcaaagattttagccgtacccctggtaattgccagaactctgctaatgaagtggatcttctgggtccaaaccagaatggttctgagggcttagcccagctgaccagcaccaatggtgccaagcctgtggaggatttctccaacatggagtcccagagtgtccccttggaccccatggaacatgtgggcatggagcctcttcagtttgattattcaggcacgcaggtacctgtggactcagcagcagcaactgtgggactttttgactacaattctcaacaacagctgttccaaagacctaatgcgcttgctgtccagcagttgacagctgctcagcagcagcagtatgcactggcagctgctcatcagccgcacatcggcccagctgtggtccctcaccagtattatggagttactccctggggagtctaccctgccagtcttttccagcagcaagctgccgctgccgctgcagcaactaattcagctaatcaacagaccaccccacaggctcagcaaggacagcagcaggttctccgtggaggagccagccaacgtcctttgaccccaaaccagaaccagcagggacagcaaacggatccccttgtggcagctgcagcagtgaattctgcccttgcatttggacaaggtctggcagcaggcatgccaggttatccggtgttggctcctgctgcttactatgaccaaactggtgcccttgtagtgaatgcaggcgcgagaaatggtcttggagctcctgttcgacttgtagctcctgccccagtcatcattagttcctcagctgcacaagcaggaacacagcagcctcagccccagccccagcagcagcccaataacaacctggcatccagttctttctacggcaacaactctctgaacagcaattcacagagcagctccctcttctcccagggctctgcccagcctgccaacacatccttgggattcggaagtagcagttctctcggcgccaccctgggatccgcccttggagggtttggaacagcagttgcaaactccaacactggcagtggctcccgccgtgactccctgactggcagcagtgacctttataagaggacatcgagcagcttgacccccattggacacagtttttataacggccttagcttttcctcctctcctggacccgtgggcatgcctctccctagtcagggaccaggacattcacagacaccacctccttccctctcttcacatggatcctcttcaagcttaaacctgggaggactcacgaatggcagtggaagatacatctctgctgctccaggcgctgaagccaagtaccgcagtgcaagcagcgcctccagcctcttcagcccgagcagcactcttttctcttcctctcgtttgcgatatggaatgtctgatgtcatgccttctggcaggagcaggcttttggaagattttcgaaacaaccggtaccccaatttacaactgcgggagattgctggacatataatggaattttcccaagaccagcatgggtccagattcattcagctgaaactggagcgtgccacaccagctgagcgccagcttgtcttcaatgaaatcctccaggctgcctaccaactcatggtggatgtgtttggtaattacgtcattcagaagttctttgaatttggcagtcttgaacagaagctggctttggcagaacggattcgaggccacgtcctgtcattggcactacagatgtatggctgccgtgttatccagaaagctcttgagtttattccttcagaccagcagaatgagatggttcgggaactagatggccatgtcttgaagtgtgtgaaagatcagaatggcaatcacgtggttcagaaatgcattgaatgtgtacagccccagtctttgcaatttatcatcgatgcgtttaagggacaggtatttgccttatccacacatccttatggctgccgagtgattcagagaatcctggagcactgtctccctgaccagacactccctattttagaggagcttcaccagcacacagagcagcttgtacaggatcaatatggaaattatgtaatccaacatgtactggagcacggtcgtcctgaggataaaagcaaaattgtagcagaaatccgaggcaatgtacttgtattgagtcagcacaaatttgcaagcaatgttgtggagaagtgtgttactcacgcctcacgtacggagcgcgctgtgctcatcgatgaggtgtgcaccatgaacgacggtccccacagtgccttatacaccatgatgaaggaccagtatgccaactacgtggtccagaagatgattgacgtggcggagccaggccagcggaagatcgtcatgcataagatccggccccacatcgcaactcttcgtaagtacacctatggcaagcacattctggccaagctggagaagtactacatgaagaacggtgttgacttagggcccatctgtggcccccctaatggtatcatctgaggcagtgtcacccgctgttccctcattcccgctgacctcactggcccactggcaaatccaaccagcaaccagaaatgttctagtgtagagtctgagacgggcaagtggttgctccaggattactccctcctccaaaaaaggaatcaaatccacgagtggaaaagcctttgtaaatttaattttattacacataacatgtactattttttttaattgactaattgccctgctgttttactggtgtataggatacttgtacataggtaaccaatgtacatgggaggccacatattttgttcactgttgtatctatatttcacatgtggaaactttcagggtggttggtttaacaaaaaaaaaaagctttaaaaaaaaaagaaaaaaaggaaaaggtttttagctcatttgcctggccggcaagttttgcaaatagctcttccccacctcctcattttagtaaaaaacaaacaaaaacaaaaaaacctgagaagtttgaattgtagttaaatgaccccaaactggcatttaacactgtttataaaaaatatatatatatatatatatatataatgaaaaaggtttcagagttgctaaagcttcagtttgtgacattaagtttatgaaattctaaaaaatgccttttttggagactatattatgctgaagaaggctgttcgtgaggaggagatgcgagcacccagaacgtcttttgaggctgggcgggtgtgattgtttactgcctactggatttttttctattaacattgaaaggtaaaatctgattatttagcatgagaaaaaaaaatccaactctgcttttggtcttgcttctataaatatatagtgtatacttggtgtagactttgcatatatacaaatttgtagtattttcttgttttgatgtctaatctgtatctataatgtaccctagtagtcgaacatacttttgattgtacaattgtacatttgtatacctgtaatgtaaatgtggagaagtttgaatcaacataaacacgttttttggtaagaaaagagaattagccagccctgtgcattcagtgtatattctcaccttttatggtcgtagcatatagtgttgtatattgtaaattgtaatttcaaccagaagtaaatttttttcttttgaaggaataaatgttctttatacagcctagttaatgtttaaaaagaaaaaaatagcttggttttatttgtcatctagtctcaagtatagcgagattctttctaaatgttattcaagattgagttctcactagtgtttttttaatcctaaaaaagtaatgttttgattttgtgacagtcaaaaggacgtgcaaaagtctagccttgcccgagctttccttacaatcagagcccctctcaccttgtaaagtgtgaatcgcccttcccttttgtacagaagatgaactgtattttgcattttgtctacttgtaagtgaatgtaacatactgtcaattttccttgtttgaatatagaattgtaacactacacggtgtacatttccagagccttgtgtatatttccaatgaacttttttgcaagcacacttgtaaccatatgtgtataattaacaaacctgtgtatgcttatgcctgggcaactattttttgtaactcttgtgtagattgtctctaaacaatgtgtgatctttattttgaaaaatacagaactttggaatctg

SEQ ID NO: 9 - DNA, 4693 bp, Homo sapiens
atgttgtcggagtgaaaggtaagggggagcgagagcgccagagagagaagatcggggggctgaaatccatcttcatcctaccgctccgcccgtgttggtggaatgagcgttgcatgtgtcttgaagagaaaagcagtgctttggcaggactctttcagcccccacctgaaacatcaccctcaagaaccagctaatcccaacatgcctgttgttttgacatctggaacagggtcgcaagcgcagccacaaccagctgcaaatcaggctcttgcagctgggactcactccagccctgtcccaggatctataggagttgcaggccgttcccaggacgacgctatggtggactacttctttcagaggcagcatggtgagcagcttgggggaggaggaagtggaggaggcggctataataatagcaaacatcgatggcctactggggataacattcatgcagaacatcaggtgcgttccatggatgaactgaatcatgattttcaagcacttgctctggagggaagagcgatgggagagggcccaagggatgcagacagtgatgaaaacgacaaaggtgaaaagaagaacaagggtacgtttgatggagataagctaggagatttgaaggaggagggtgatgtgatggacaagaccaatggtttaccagtgcagaatgggattgatgcagacgtcaaagattttagccgtacccctggtaattgccagaactctgctaatgaagtggatcttctgggtccaaaccagaatggttctgagggcttagcccagctgaccagcaccaatggtgccaagcctgtggaggatttctccaacatggagtcccagagtgtccccttggaccccatggaacatgtgggcatggagcctcttcagtttgattattcaggcacgcaggtacctgtggactcagcagcagcaactgtgggactttttgactacaattctcaacaacagctgttccaaagacctaatgcgcttgctgtccagcagttgacagctgctcagcagcagcagtatgcactggcagctgctcatcagccgcacatcggcccagctgtggtccctcaccagtattatggagttactccctggggagtctaccctgccagtcttttccagcagcaagctgccgctgccgctgcagcaactaattcagctaatcaacagaccaccccacaggctcagcaaggacagcagcaggttctccgtggaggagccagccaacgtcctttgaccccaaaccagaaccagcagggacagcaaacggatccccttgtggcagctgcagcagtgaattctgcccttgcatttggacaaggtctggcagcaggcatgccaggttatccggtgttggctcctgctgcttactatgaccaaactggtgcccttgtagtgaatgcaggcgcgagaaatggtcttggagctcctgttcgacttgtagctcctgccccagtcatcattagttcctcagctgcacaagcaggaacacagcagcctcagccccagccccagcagcagcccaataacaacctggcatccagttctttctacggcaacaactctctgaacagcaattcacagagcagctccctcttctcccagggctctgcccagcctgccaacacatccttgggattcggaagtagcagttctctcggcgccaccctgggatccgcccttggagggtttggaacagcagttgcaaactccaacactggcagtggctcccgccgtgactccctgactggcagcagtgacctttataagaggacatcgagcagcttgacccccattggacacagtttttataacggccttagcttttcctcctctcctggacccgtgggcatgcctctccctagtcagggaccaggacattcacagacaccacctccttccctctcttcacatggatcctcttcaagcttaaacctgggaggactcacgaatggcagtggaagatacatctctgctgctccaggcgctgaagccaagtaccgcagtgcaagcagcgcctccagcctcttcagcccgagcagcactcttttctcttcctctcgtttgcgatatggaatgtctgatgtcatgccttctggcaggagcaggcttttggaagattttcgaaacaaccggtaccccaatttacaactgcgggagattgctggacatataatggaattttcccaagaccagcatgggtccagattcattcagctgaaactggagcgtgccacaccagctgagcgccagcttgtcttcaatgaaatcctccaggctgcctaccaactcatggtggatgtgtttggtaattacgtcattcagaagttctttgaatttggcagtcttgaacagaagctggctttggcagaacggattcgaggccacgtcctgtcattggcactacagatgtatggctgccgtgttatccagaaagctcttgagtttattccttcagaccagcagaatgagatggttcgggaactagatggccatgtcttgaagtgtgtgaaagatcagaatggcaatcacgtggttcagaaatgcattgaatgtgtacagccccagtctttgcaatttatcatcgatgcgtttaagggacaggtatttgccttatccacacatccttatggctgccgagtgattcagagaatcctggagcactgtctccctgaccagacactccctattttagaggagcttcaccagcacacagagcagcttgtacaggatcaatatggaaattatgtaatccaacatgtactggagcacggtcgtcctgaggataaaagcaaaattgtagcagaaatccgaggcaatgtacttgtattgagtcagcacaaatttgcaagcaatgttgtggagaagtgtgttactcacgcctcacgtacggagcgcgctgtgctcatcgatgaggtgtgcaccatgaacgacggtccccacagtgccttatacaccatgatgaaggaccagtatgccaactacgtggtccagaagatgattgacgtggcggagccaggccagcggaagatcgtcatgcataagatccggccccacatcgcaactcttcgtaagtacacctatggcaagcacattctggccaagctggagaagtactacatgaagaacggtgttgacttagggcccatctgtggcccccctaatggtatcatctgaggcagtgtcacccgctgttccctcattcccgctgacctcactggcccactggcaaatccaaccagcaaccagaaatgttctagtgtagagtctgagacgggcaagtggttgctccaggattactccctcctccaaaaaaggaatcaaatccacgagtggaaaagcctttgtaaatttaattttattacacataacatgtactattttttttaattgactaattgccctgctgttttactggtgtataggatacttgtacataggtaaccaatgtacatgggaggccacatattttgttcactgttgtatctatatttcacatgtggaaactttcagggtggttggtttaacaaaaaaaaaaagctttaaaaaaaaaagaaaaaaaggaaaaggtttttagctcatttgcctggccggcaagttttgcaaatagctcttccccacctcctcattttagtaaaaaacaaacaaaaacaaaaaaacctgagaagtttgaattgtagttaaatgaccccaaactggcatttaacactgtttataaaaaatatatatatatatatatatatataatgaaaaaggtttcagagttgctaaagcttcagtttgtgacattaagtttatgaaattctaaaaaatgccttttttggagactatattatgctgaagaaggctgttcgtgaggaggagatgcgagcacccagaacgtcttttgaggctgggcgggtgtgattgtttactgcctactggatttttttctattaacattgaaaggtaaaatctgattatttagcatgagaaaaaaaaatccaactctgcttttggtcttgcttctataaatatatagtgtatacttggtgtagactttgcatatatacaaatttgtagtattttcttgttttgatgtctaatctgtatctataatgtaccctagtagtcgaacatacttttgattgtacaattgtacatttgtatacctgtaatgtaaatgtggagaagtttgaatcaacataaacacgttttttggtaagaaaagagaattagccagccctgtgcattcagtgtatattctcaccttttatggtcgtagcatatagtgttgtatattgtaaattgtaatttcaaccagaagtaaatttttttcttttgaaggaataaatgttctttatacagcctagttaatgtttaaaaagaaaaaaatagcttggttttatttgtcatctagtctcaagtatagcgagattctttctaaatgttattcaagattgagttctcactagtgtttttttaatcctaaaaaagtaatgttttgattttgtgacagtcaaaaggacgtgcaaaagtctagccttgcccgagctttccttacaatcagagcccctctcaccttgtaaaaaacctgtgtatgcttatgcctgggcaactattttttgtaactcttgtgtagattgtctctaaacaatgtgtgatctttattttgaaaaatacagaactttggaatctg

SEQ ID NO: 10 - DNA, 5073 bp, Homo sapiens
atgttgtcggagtgaaaggtaagggggagcgagagcgccagagagagaagatcggggggctgaaatccatcttcatcctaccgctccgcccgtgttggtggaatgagcgttgcatgtgtcttgaagagaaaagcagtgctttggcaggactctttcagcccccacctgaaacatcaccctcaagaaccagctaatcccaacatgcctgttgttttgacatctggaacagggtcgcaagcgcagccacaaccagctgcaaatcaggctcttgcagctgggactcactccagccctgtcccaggatctataggagttgcaggccgttcccaggacgacgctatggtggactacttctttcagaggcagcatggtgagcagcttgggggaggaggaagtggaggaggcggctataataatagcaaacatcgatggcctactggggataacattcatgcagaacatcaggtgcgttccatggatgaactgaatcatgattttcaagcacttgctctggagggaagagcgatgggagagggcccaagggatgcagacagtgatgaaaacgacaaaggtgaaaagaagaacaagggtacgtttgatggagataagctaggagatttgaaggaggagggtgatgtgatggacaagaccaatggtttaccagtgcagaatgggattgatgcagacgtcaaagattttagccgtacccctggtaattgccagaactctgctaatgaagtggatcttctgggtccaaaccagaatggttctgagggcttagcccagctgaccagcaccaatggtgccaagcctgtggaggatttctccaacatggagtcccagagtgtccccttggaccccatggaacatgtgggcatggagcctcttcagtttgattattcaggcacgcaggtacctgtggactcagcagcagcaactgtgggactttttgactacaattctcaacaacagctgttccaaagacctaatgcgcttgctgtccagcagttgacagctgctcagcagcagcagtatgcactggcagctgctcatcagccgcacatcggcccagctgtggtccctcaccagtattatggagttactccctggggagtctaccctgccagtcttttccagcagcaagctgccgctgccgctgcagcaactaattcagctaatcaacagaccaccccacaggctcagcaaggacagcagcaggttctccgtggaggagccagccaacgtcctttgaccccaaaccagaaccagcagggacagcaaacggatccccttgtggcagctgcagcagtgaattctgcccttgcatttggacaaggtctggcagcaggcatgccaggttatccggtgttggctcctgctgcttactatgaccaaactggtgcccttgtagtgaatgcaggcgcgagaaatggtcttggagctcctgttcgacttgtagctcctgccccagtcatcattagttcctcagctgcacaagcagctgttgcagcagccgcagcttcagcaaatggagcagctggtggtcttgctggaacaacaaatggaccatttcgccctttaggaacacagcagcctcagccccagccccagcagcagcccaataacaacctggcatccagttctttctacggcaacaactctctgaacagcaattcacagagcagctccctcttctcccagggctctgcccagcctgccaacacatccttgggattcggaagtagcagttctctcggcgccaccctgggatccgcccttggagggtttggaacagcagttgcaaactccaacactggcagtggctcccgccgtgactccctgactggcagcagtgacctttataagaggacatcgagcagcttgacccccattggacacagtttttataacggccttagcttttcctcctctcctggacccgtgggcatgcctctccctagtcagggaccaggacattcacagacaccacctccttccctctcttcacatggatcctcttcaagcttaaacctgggaggactcacgaatggcagtggaagatacatctctgctgctccaggcgctgaagccaagtaccgcagtgcaagcagcgcctccagcctcttcagcccgagcagcactcttttctcttcctctcgtttgcgatatggaatgtctgatgtcatgccttctggcaggagcaggcttttggaagattttcgaaacaaccggtaccccaatttacaactgcgggagattgctggacatataatggaattttcccaagaccagcatgggtccagattcattcagctgaaactggagcgtgccacaccagctgagcgccagcttgtcttcaatgaaatcctccaggctgcctaccaactcatggtggatgtgtttggtaattacgtcattcagaagttctttgaatttggcagtcttgaacagaagctggctttggcagaacggattcgaggccacgtcctgtcattggcactacagatgtatggctgccgtgttatccagaaagctcttgagtttattccttcagaccagcagaatgagatggttcgggaactagatggccatgtcttgaagtgtgtgaaagatcagaatggcaatcacgtggttcagaaatgcattgaatgtgtacagccccagtctttgcaatttatcatcgatgcgtttaagggacaggtatttgccttatccacacatccttatggctgccgagtgattcagagaatcctggagcactgtctccctgaccagacactccctattttagaggagcttcaccagcacacagagcagcttgtacaggatcaatatggaaattatgtaatccaacatgtactggagcacggtcgtcctgaggataaaagcaaaattgtagcagaaatccgaggcaatgtacttgtattgagtcagcacaaatttgcaagcaatgttgtggagaagtgtgttactcacgcctcacgtacggagcgcgctgtgctcatcgatgaggtgtgcaccatgaacgacggtccccacagtgccttatacaccatgatgaaggaccagtatgccaactacgtggtccagaagatgattgacgtggcggagccaggccagcggaagatcgtcatgcataagatccggccccacatcgcaactcttcgtaagtacacctatggcaagcacattctggccaagctggagaagtactacatgaagaacggtgttgacttagggcccatctgtggcccccctaatggtatcatctgaggcagtgtcacccgctgttccctcattcccgctgacctcactggcccactggcaaatccaaccagcaaccagaaatgttctagtgtagagtctgagacgggcaagtggttgctccaggattactccctcctccaaaaaaggaatcaaatccacgagtggaaaagcctttgtaaatttaattttattacacataacatgtactattttttttaattgactaattgccctgctgttttactggtgtataggatacttgtacataggtaaccaatgtacatgggaggccacatattttgttcactgttgtatctatatttcacatgtggaaactttcagggtggttggtttaacaaaaaaaaaaagctttaaaaaaaaaagaaaaaaaggaaaaggtttttagctcatttgcctggccggcaagttttgcaaatagctcttccccacctcctcattttagtaaaaaacaaacaaaaacaaaaaaacctgagaagtttgaattgtagttaaatgaccccaaactggcatttaacactgtttataaaaaatatatatatatatatatatatataatgaaaaaggtttcagagttgctaaagcttcagtttgtgacattaagtttatgaaattctaaaaaatgccttttttggagactatattatgctgaagaaggctgttcgtgaggaggagatgcgagcacccagaacgtcttttgaggctgggcgggtgtgattgtttactgcctactggatttttttctattaacattgaaaggtaaaatctgattatttagcatgagaaaaaaaaatccaactctgcttttggtcttgcttctataaatatatagtgtatacttggtgtagactttgcatatatacaaatttgtagtattttcttgttttgatgtctaatctgtatctataatgtaccctagtagtcgaacatacttttgattgtacaattgtacatttgtatacctgtaatgtaaatgtggagaagtttgaatcaacataaacacgttttttggtaagaaaagagaattagccagccctgtgcattcagtgtatattctcaccttttatggtcgtagcatatagtgttgtatattgtaaattgtaatttcaaccagaagtaaatttttttcttttgaaggaataaatgttctttatacagcctagttaatgtttaaaaagaaaaaaatagcttggttttatttgtcatctagtctcaagtatagcgagattctttctaaatgttattcaagattgagttctcactagtgtttttttaatcctaaaaaagtaatgttttgattttgtgacagtcaaaaggacgtgcaaaagtctagccttgcccgagctttccttacaatcagagcccctctcaccttgtaaagtgtgaatcgcccttcccttttgtacagaagatgaactgtattttgcattttgtctacttgtaagtgaatgtaacatactgtcaattttccttgtttgaatatagaattgtaacactacacggtgtacatttccagagccttgtgtatatttccaatgaacttttttgcaagcacacttgtaaccatatgtgtataattaacaaacctgtgtatgcttatgcctgggcaactattttttgtaactcttgtgtagattgtctctaaacaatgtgtgatctttattttgaaaaatacagaactttggaatctgaaaaaaaaaaaaaaaaaaaaaaaamaamaaaaasaaaaaacaaaacaaaaacarrmaamaraaamaaacacaaaaraaarammaaaacacaacaaca

SEQ ID NO: 11 - DNA, 5025 bp, Homo sapiens
atgttgtcggagtgaaaggtaagggggagcgagagcgccagagagagaagatcggggggctgaaatccatcttcatcctaccgctccgcccgtgttggtggaatgagcgttgcatgtgtcttgaagagaaaagcagtgctttggcaggactctttcagcccccacctgaaacatcaccctcaagaaccagctaatcccaacatgcctgttgttttgacatctggaacagggtcgcaagcgcagccacaaccagctgcaaatcaggctcttgcagctgggactcactccagccctgtcccaggatctataggagttgcaggccgttcccaggacgacgctatggtggactacttctttcagaggcagcatggtgagcagcttgggggaggaggaagtggaggaggcggctataataatagcaaacatcgatggcctactggggataacattcatgcagaacatcaggtgcgttccatggatgaactgaatcatgattttcaagcacttgctctggagggaagagcgatgggagagcagctcttgccaggtaaaaagttttgggaaacagatgaatccagcaaagatggaccaaaaggaatattcctgggtgatcaatggcgagacagtgcctggggaacatcagatcattcagtttcccagccaatcatggtgcagagaagacctggtcagagtttccatgtgaacagtgaggtcaattctgtactgtccccacgatcggagagtgggggactaggcgttagcatggtggagtatgtgttgagctcatccccgggcgattcctgtctaagaaaaggaggatttctgttccaaagacctaatgcgcttgctgtccagcagttgacagctgctcagcagcagcagtatgcactggcagctgctcatcagccgcacatcggtttagctcccgctgcgtttgtccccaatccatacatcatcagcgctgctcccccagggacggacccctacacagctggattggctgcagcagcgacactaggcccagctgtggtccctcaccagtattatggagttactccctggggagtctaccctgccagtcttttccagcagcaagctgccgctgccgctgcagcaactaattcagctaatcaacagaccaccccacaggctcagcaaggacagcagcaggttctccgtggaggagccagccaacgtcctttgaccccaaaccagaaccagcagggacagcaaacggatccccttgtggcagctgcagcagtgaattctgcccttgcatttggacaaggtctggcagcaggcatgccaggttatccggtgttggctcctgctgcttactatgaccaaactggtgcccttgtagtgaatgcaggcgcgagaaatggtcttggagctcctgttcgacttgtagctcctgccccagtcatcattagttcctcagctgcacaagcagctgttgcagcagccgcagcttcagcaaatggagcagctggtggtcttgctggaacaacaaatggaccatttcgccctttaggaacacagcagcctcagccccagccccagcagcagcccaataacaacctggcatccagttctttctacggcaacaactctctgaacagcaattcacagagcagctccctcttctcccagggctctgcccagcctgccaacacatccttgggattcggaagtagcagttctctcggcgccaccctgggatccgcccttggagggtttggaacagcagttgcaaactccaacactggcagtggctcccgccgtgactccctgactggcagcagtgacctttataagaggacatcgagcagcttgacccccattggacacagtttttataacggccttagcttttcctcctctcctggacccgtgggcatgcctctccctagtcagggaccaggacattcacagacaccacctccttccctctcttcacatggatcctcttcaagcttaaacctgggaggactcacgaatggcagtggaagatacatctctgctgctccaggcgctgaagccaagtaccgcagtgcaagcagcgcctccagcctcttcagcccgagcagcactcttttctcttcctctcgtttgcgatatggaatgtctgatgtcatgccttctggcaggagcaggcttttggaagattttcgaaacaaccggtaccccaatttacaactgcgggagattgctggacatataatggaattttcccaagaccagcatgggtccagattcattcagctgaaactggagcgtgccacaccagctgagcgccagcttgtcttcaatgaaatcctccaggctgcctaccaactcatggtggatgtgtttggtaattacgtcattcagaagttctttgaatttggcagtcttgaacagaagctggctttggcagaacggattcgaggccacgtcctgtcattggcactacagatgtatggctgccgtgttatccagaaagctcttgagtttattccttcagaccagcagaatgagatggttcgggaactagatggccatgtcttgaagtgtgtgaaagatcagaatggcaatcacgtggttcagaaatgcattgaatgtgtacagccccagtctttgcaatttatcatcgatgcgtttaagggacaggtatttgccttatccacacatccttatggctgccgagtgattcagagaatcctggagcactgtctccctgaccagacactccctattttagaggagcttcaccagcacacagagcagcttgtacaggatcaatatggaaattatgtaatccaacatgtactggagcacggtcgtcctgaggataaaagcaaaattgtagcagaaatccgaggcaatgtacttgtattgagtcagcacaaatttgcaagcaatgttgtggagaagtgtgttactcacgcctcacgtacggagcgcgctgtgctcatcgatgaggtgtgcaccatgaacgacggtccccacagtgccttatacaccatgatgaaggaccagtatgccaactacgtggtccagaagatgattgacgtggcggagccaggccagcggaagatcgtcatgcataagatccggccccacatcgcaactcttcgtaagtacacctatggcaagcacattctggccaagctggagaagtactacatgaagaacggtgttgacttagggcccatctgtggcccccctaatggtatcatctgaggcagtgtcacccgctgttccctcattcccgctgacctcactggcccactggcaaatccaaccagcaaccagaaatgttctagtgtagagtctgagacgggcaagtggttgctccaggattactccctcctccaaaaaaggaatcaaatccacgagtggaaaagcctttgtaaatttaattttattacacataacatgtactattttttttaattgactaattgccctgctgttttactggtgtataggatacttgtacataggtaaccaatgtacatgggaggccacatattttgttcactgttgtatctatatttcacatgtggaaactttcagggtggttggtttaacaaaaaaaaaaagctttaaaaaaaaaagaaaaaaaggaaaaggtttttagctcatttgcctggccggcaagttttgcaaatagctcttccccacctcctcattttagtaaaaaacaaacaaaaacaaaaaaacctgagaagtttgaattgtagttaaatgaccccaaactggcatttaacactgtttataaaaaatatatatatatatatatatatataatgaaaaaggtttcagagttgctaaagcttcagtttgtgacattaagtttatgaaattctaaaaaatgccttttttggagactatattatgctgaagaaggctgttcgtgaggaggagatgcgagcacccagaacgtcttttgaggctgggcgggtgtgattgtttactgcctactggatttttttctattaacattgaaaggtaaaatctgattatttagcatgagaaaaaaaaatccaactctgcttttggtcttgcttctataaatatatagtgtatacttggtgtagactttgcatatatacaaatttgtagtattttcttgttttgatgtctaatctgtatctataatgtaccctagtagtcgaacatacttttgattgtacaattgtacatttgtatacctgtaatgtaaatgtggagaagtttgaatcaacataaacacgttttttggtaagaaaagagaattagccagccctgtgcattcagtgtatattctcaccttttatggtcgtagcatatagtgttgtatattgtaaattgtaatttcaaccagaagtaaatttttttcttttgaaggaataaatgttctttatacagcctagttaatgtttaaaaagaaaaaaatagcttggttttatttgtcatctagtctcaagtatagcgagattctttctaaatgttattcaagattgagttctcactagtgtttttttaatcctaaaaaagtaatgttttgattttgtgacagtcaaaaggacgtgcaaaagtctagccttgcccgagctttccttacaatcagagcccctctcaccttgtaaagtgtgaatcgcccttcccttttgtacagaagatgaactgtattttgcattttgtctacttgtaagtgaatgtaacatactgtcaattttccttgtttgaatatagaattgtaacactacacggtgtacatttccagagccttgtgtatatttccaatgaacttttttgcaagcacacttgtaaccatatgtgtataattaacaaacctgtgtatgcttatgcctgggcaactattttttgtaactcttgtgtagattgtctctaaacaatgtgtgatctttattttgaaaaatacagaactttggaatctgaaaaaaaaaaaaaaaaaaaaaaaamaamaaaaasaaaaaacaaaacaaaaacarrmaamaraaamaaacacaaaaraaarammaaaacacaacaaca

SEQ ID NO: 12 - DNA, 4928 bp, Homo sapiens
atgttgtcggagtgaaaggtaagggggagcgagagcgccagagagagaagatcggggggctgaaatccatcttcatcctaccgctccgcccgtgttggtggaatgagcgttgcatgtgtcttgaagagaaaagcagtgctttggcaggactctttcagcccccacctgaaacatcaccctcaagaaccagctaatcccaacatgcctgttgttttgacatctggaacagggtcgcaagcgcagccacaaccagctgcaaatcaggctcttgcagctgggactcactccagccctgtcccaggatctataggagttgcaggccgttcccaggacgacgctatggtggactacttctttcagaggcagcatggtgagcagcttgggggaggaggaagtggaggaggcggctataataatagcaaacatcgatggcctactggggataacattcatgcagaacatcaggtgcgttccatggatgaactgaatcatgattttcaagcacttgctctggagggaagagcgatgggagagcagctcttgccaggtaaaaagttttgggaaacagatgaatccagcaaagatggaccaaaaggaatattcctgggtgatcaatggcgagacagtgcctggggaacatcagatcattcagtttcccagccaatcatggtgcagagaagacctggtcagagtttccatgtgaacagtgaggtcaattctgtactgtccccacgatcggagagtgggggactaggcgttagcatggtggagtatgtgttgagctcatccccgggcgattcctgtctaagaaaaggaggatttctgttccaaagacctaatgcgcttgctgtccagcagttgacagctgctcagcagcagcagtatgcactggcagctgctcatcagccgcacatcggtttagctcccgctgcgtttgtccccaatccatacatcatcagcgctgctcccccagggacggacccctacacagctggattggctgcagcagcgacactaggcccagctgtggtccctcaccagtattatggagttactccctggggagtctaccctgccagtcttttccagcagcaagctgccgctgccgctgcagcaactaattcagctaatcaacagaccaccccacaggctcagcaaggacagcagcaggttctccgtggaggagccagccaacgtcctttgaccccaaaccagaaccagcagggacagcaaacggatccccttgtggcagctgcagcagtgaattctgcccttgcatttggacaaggtctggcagcaggcatgccaggttatccggtgttggctcctgctgcttactatgaccaaactggtgcccttgtagtgaatgcaggcgcgagaaatggtcttggagctcctgttcgacttgtagctcctgccccagtcatcattagttcctcagctgcacaagcagctgttgcagcagccgcagcttcagcaaatggagcagctggtggtcttgctggaacaacaaatggaccatttcgccctttaggaacacagcagcctcagccccagccccagcagcagcccaataacaacctggcatccagttctttctacggcaacaactctctgaacagcaattcacagagcagctccctcttctcccagggctctgcccagcctgccaacacatccttgggattcggaagtagcagttctctcggcgccaccctgggatccgcccttggagggtttggaacagcagttgcaaactccaacactggcagtggctcccgccgtgactccctgactggcagcagtgacctttataagaggacatcgagcagcttgacccccattggacacagtttttataacggccttagcttttcctcctctcctggacccgtgggcatgcctctccctagtcagggaccaggacattcacagacaccacctccttccctctcttcacatggatcctcttcaagcttaaacctgggaggactcacgaatggcagtggaagatacatctctgctgctccaggcgctgaagccaagtaccgcagtgcaagcagcgcctccagcctcttcagcccgagcagcactcttttctcttcctctcgtttgcgatatggaatgtctgatgtcatgccttctggcaggagcaggcttttggaagattttcgaaacaaccggtaccccaatttacaactgcgggagattgctggacatataatggaattttcccaagaccagcatgggtccagattcattcagctgaaactggagcgtgccacaccagctgagcgccagcttgtcttcaatgaaatcctccaggctgcctaccaactcatggtggatgtgtttggtaattacgtcattcagaagttctttgaatttggcagtcttgaacagaagctggctttggcagaacggattcgaggccacgtcctgtcattggcactacagatgtatggctgccgtgttatccagaaagctcttgagtttattccttcagaccagcagaatgagatggttcgggaactagatggccatgtcttgaagtgtgtgaaagatcagaatggcaatcacgtggttcagaaatgcattgaatgtgtacagccccagtctttgcaatttatcatcgatgcgtttaagggacaggtatttgccttatccacacatccttatggctgccgagtgattcagagaatcctggagcactgtctccctgaccagacactccctattttagaggagcttcaccagcacacagagcagcttgtacaggatcaatatggaaattatgtaatccaacatgtactggagcacggtcgtcctgaggataaaagcaaaattgtagcagaaatccgaggcaatgtacttgtattgagtcagcacaaatttgcaagcaatgttgtggagaagtgtgttactcacgcctcacgtacggagcgcgctgtgctcatcgatgaggtgtgcaccatgaacgacggtccccacagtgccttatacaccatgatgaaggaccagtatgccaactacgtggtccagaagatgattgacgtggcggagccaggccagcggaagatcgtcatgcataagatccggccccacatcgcaactcttcgtaagtacacctatggcaagcacattctggccaagctggagaagtactacatgaagaacggtgttgacttagggcccatctgtggcccccctaatggtatcatctgaggcagtgtcacccgctgttccctcattcccgctgacctcactggcccactggcaaatccaaccagcaaccagaaatgttctagtgtagagtctgagacgggcaagtggttgctccaggattactccctcctccaaaaaaggaatcaaatccacgagtggaaaagcctttgtaaatttaattttattacacataacatgtactattttttttaattgactaattgccctgctgttttactggtgtataggatacttgtacataggtaaccaatgtacatgggaggccacatattttgttcactgttgtatctatatttcacatgtggaaactttcagggtggttggtttaacaaaaaaaaaaagctttaaaaaaaaaagaaaaaaaggaaaaggtttttagctcatttgcctggccggcaagttttgcaaatagctcttccccacctcctcattttagtaaaaaacaaacaaaaacaaaaaaacctgagaagtttgaattgtagttaaatgaccccaaactggcatttaacactgtttataaaaaatatatatatatatatatatatataatgaaaaaggtttcagagttgctaaagcttcagtttgtgacattaagtttatgaaattctaaaaaatgccttttttggagactatattatgctgaagaaggctgttcgtgaggaggagatgcgagcacccagaacgtcttttgaggctgggcgggtgtgattgtttactgcctactggatttttttctattaacattgaaaggtaaaatctgattatttagcatgagaaaaaaaaatccaactctgcttttggtcttgcttctataaatatatagtgtatacttggtgtagactttgcatatatacaaatttgtagtattttcttgttttgatgtctaatctgtatctataatgtaccctagtagtcgaacatacttttgattgtacaattgtacatttgtatacctgtaatgtaaatgtggagaagtttgaatcaacataaacacgttttttggtaagaaaagagaattagccagccctgtgcattcagtgtatattctcaccttttatggtcgtagcatatagtgttgtatattgtaaattgtaatttcaaccagaagtaaatttttttcttttgaaggaataaatgttctttatacagcctagttaatgtttaaaaagaaaaaaatagcttggttttatttgtcatctagtctcaagtatagcgagattctttctaaatgttattcaagattgagttctcactagtgtttttttaatcctaaaaaagtaatgttttgattttgtgacagtcaaaaggacgtgcaaaagtctagccttgcccgagctttccttacaatcagagcccctctcaccttgtaaagtgtgaatcgcccttcccttttgtacagaagatgaactgtattttgcattttgtctacttgtaagtgaatgtaacatactgtcaattttccttgtttgaatatagaattgtaacactacacggtgtacatttccagagccttgtgtatatttccaatgaacttttttgcaagcacacttgtaaccatatgtgtataattaacaaacctgtgtatgcttatgcctgggcaactattttttgtaactcttgtgtagattgtctctaaacaatgtgtgatctttattttgaaaaatacagaactttggaatctg

SEQ ID NO: 13 - DNA, 4726 bp, Homo sapiens
atgttgtcggagtgaaaggtaagggggagcgagagcgccagagagagaagatcggggggctgaaatccatcttcatcctaccgctccgcccgtgttggtggaatgagcgttgcatgtgtcttgaagagaaaagcagtgctttggcaggactctttcagcccccacctgaaacatcaccctcaagaaccagctaatcccaacatgcctgttgttttgacatctggaacagggtcgcaagcgcagccacaaccagctgcaaatcaggctcttgcagctgggactcactccagccctgtcccaggatctataggagttgcaggccgttcccaggacgacgctatggtggactacttctttcagaggcagcatggtgagcagcttgggggaggaggaagtggaggaggcggctataataatagcaaacatcgatggcctactggggataacattcatgcagaacatcaggtgcgttccatggatgaactgaatcatgattttcaagcacttgctctggagggaagagcgatgggagagcagctcttgccaggtaaaaagttttgggaaacagatgaatccagcaaagatggaccaaaaggaatattcctgggtgatcaatggcgagacagtgcctggggaacatcagatcattcagtttcccagccaatcatggtgcagagaagacctggtcagagtttccatgtgaacagtgaggtcaattctgtactgtccccacgatcggagagtgggggactaggcgttagcatggtggagtatgtgttgagctcatccccgggcgattcctgtctaagaaaaggaggatttctgttccaaagacctaatgcgcttgctgtccagcagttgacagctgctcagcagcagcagtatgcactggcagctgctcatcagccgcacatcggtttagctcccgctgcgtttgtccccaatccatacatcatcagcgctgctcccccagggacggacccctacacagctggattggctgcagcagcgacactaggcccagctgtggtccctcaccagtattatggagttactccctggggagtctaccctgccagtcttttccagcagcaagctgccgctgccgctgcagcaactaattcagctaatcaacagaccaccccacaggctcagcaaggacagcagcaggttctccgtggaggagccagccaacgtcctttgaccccaaaccagaaccagcagggacagcaaacggatccccttgtggcagctgcagcagtgaattctgcccttgcatttggacaaggtctggcagcaggcatgccaggttatccggtgttggctcctgctgcttactatgaccaaactggtgcccttgtagtgaatgcaggcgcgagaaatggtcttggagctcctgttcgacttgtagctcctgccccagtcatcattagttcctcagctgcacaagcagctgttgcagcagccgcagcttcagcaaatggagcagctggtggtcttgctggaacaacaaatggaccatttcgccctttaggaacacagcagcctcagccccagccccagcagcagcccaataacaacctggcatccagttctttctacggcaacaactctctgaacagcaattcacagagcagctccctcttctcccagggctctgcccagcctgccaacacatccttgggattcggaagtagcagttctctcggcgccaccctgggatccgcccttggagggtttggaacagcagttgcaaactccaacactggcagtggctcccgccgtgactccctgactggcagcagtgacctttataagaggacatcgagcagcttgacccccattggacacagtttttataacggccttagcttttcctcctctcctggacccgtgggcatgcctctccctagtcagggaccaggacattcacagacaccacctccttccctctcttcacatggatcctcttcaagcttaaacctgggaggactcacgaatggcagtggaagatacatctctgctgctccaggcgctgaagccaagtaccgcagtgcaagcagcgcctccagcctcttcagcccgagcagcactcttttctcttcctctcgtttgcgatatggaatgtctgatgtcatgccttctggcaggagcaggcttttggaagattttcgaaacaaccggtaccccaatttacaactgcgggagattgctggacatataatggaattttcccaagaccagcatgggtccagattcattcagctgaaactggagcgtgccacaccagctgagcgccagcttgtcttcaatgaaatcctccaggctgcctaccaactcatggtggatgtgtttggtaattacgtcattcagaagttctttgaatttggcagtcttgaacagaagctggctttggcagaacggattcgaggccacgtcctgtcattggcactacagatgtatggctgccgtgttatccagaaagctcttgagtttattccttcagaccagcagaatgagatggttcgggaactagatggccatgtcttgaagtgtgtgaaagatcagaatggcaatcacgtggttcagaaatgcattgaatgtgtacagccccagtctttgcaatttatcatcgatgcgtttaagggacaggtatttgccttatccacacatccttatggctgccgagtgattcagagaatcctggagcactgtctccctgaccagacactccctattttagaggagcttcaccagcacacagagcagcttgtacaggatcaatatggaaattatgtaatccaacatgtactggagcacggtcgtcctgaggataaaagcaaaattgtagcagaaatccgaggcaatgtacttgtattgagtcagcacaaatttgcaagcaatgttgtggagaagtgtgttactcacgcctcacgtacggagcgcgctgtgctcatcgatgaggtgtgcaccatgaacgacggtccccacagtgccttatacaccatgatgaaggaccagtatgccaactacgtggtccagaagatgattgacgtggcggagccaggccagcggaagatcgtcatgcataagatccggccccacatcgcaactcttcgtaagtacacctatggcaagcacattctggccaagctggagaagtactacatgaagaacggtgttgacttagggcccatctgtggcccccctaatggtatcatctgaggcagtgtcacccgctgttccctcattcccgctgacctcactggcccactggcaaatccaaccagcaaccagaaatgttctagtgtagagtctgagacgggcaagtggttgctccaggattactccctcctccaaaaaaggaatcaaatccacgagtggaaaagcctttgtaaatttaattttattacacataacatgtactattttttttaattgactaattgccctgctgttttactggtgtataggatacttgtacataggtaaccaatgtacatgggaggccacatattttgttcactgttgtatctatatttcacatgtggaaactttcagggtggttggtttaacaaaaaaaaaaagctttaaaaaaaaaagaaaaaaaggaaaaggtttttagctcatttgcctggccggcaagttttgcaaatagctcttccccacctcctcattttagtaaaaaacaaacaaaaacaaaaaaacctgagaagtttgaattgtagttaaatgaccccaaactggcatttaacactgtttataaaaaatatatatatatatatatatatataatgaaaaaggtttcagagttgctaaagcttcagtttgtgacattaagtttatgaaattctaaaaaatgccttttttggagactatattatgctgaagaaggctgttcgtgaggaggagatgcgagcacccagaacgtcttttgaggctgggcgggtgtgattgtttactgcctactggatttttttctattaacattgaaaggtaaaatctgattatttagcatgagaaaaaaaaatccaactctgcttttggtcttgcttctataaatatatagtgtatacttggtgtagactttgcatatatacaaatttgtagtattttcttgttttgatgtctaatctgtatctataatgtaccctagtagtcgaacatacttttgattgtacaattgtacatttgtatacctgtaatgtaaatgtggagaagtttgaatcaacataaacacgttttttggtaagaaaagagaattagccagccctgtgcattcagtgtatattctcaccttttatggtcgtagcatatagtgttgtatattgtaaattgtaatttcaaccagaagtaaatttttttcttttgaaggaataaatgttctttatacagcctagttaatgtttaaaaagaaaaaaatagcttggttttatttgtcatctagtctcaagtatagcgagattctttctaaatgttattcaagattgagttctcactagtgtttttttaatcctaaaaaagtaatgttttgattttgtgacagtcaaaaggacgtgcaaaagtctagccttgcccgagctttccttacaatcagagcccctctcaccttgtaaaaaacctgtgtatgcttatgcctgggcaactattttttgtaactcttgtgtagattgtctctaaacaatgtgtgatctttattttgaaaaatacagaactttggaatctg

SEQ ID NO: 14 - DNA, 2733 bp, Homo sapiens
gcggccgcggagcaagaagggcgccgcggcgtgcggcccgcgcagcccccggagccatgggcaagtgcagcgggcgctgcacgctggtcgccttctgctgcctgcagctggtggctgcgctggagcggcagatctttgacttcctgggctaccagtgggctcccatcctagccaacttcctgcacatcatggcagtcatcctgggcatctttggcaccgtgcagtaccgctcccggtacctcatcctgtatgcagcctggctggtgctctgggttggctggaatgcatttatcatctgcttctacttggaggttggacagctgtcccaggaccgggacttcatcatgaccttcaacacatccctgcaccgctcctggtggatggagaatgggccaggctgcctggtgacacctgttctgaactcccgcctggctctggaggaccaccatgtcatctctgtcactggctgcctgcttgactacccctacattgaagccctcagcagcgccctgcagatcttcctggcactgttcggcttcgtgttcgcctgctacgtgagcaaagtgttcctggaggaggaggacagctttgacttcatcggcggctttgactcctacggataccaggcgccccagaagacgtcgcatttacagctgcagcctctgtacacgtcggggtagcctctgccccgcgcccaccccggcgcctcgccctgggctgaccgcagctgccgcgagctcgggccaaggcgcaggcgtgtccccctggtggcccgcgctctcactgcagcctgtgcccaaccccgcgtctgcatctggagatgcggacttggacgtggacttggacttggacttggatttgagcttggctcttcgcagcccggacttcggaggagtggggcggggcgggggaggggcaccacgggttttttgttttttgtttgtttgtttttaatctcagccttggcgtgagctggggccttcctctcttctccagcctctccctttcactcttcacccagcatcctgcccccctgtccaaaaacagcaggacatcagacccatcccatcccaccacactcactcaccagctctggggaaagctactgtgaactaggagcaggattcctgggttctaatcgcaggtccatcactgactgtgacgtctagcaaagcccttgccctctctgagcctcggtttccgcacctcaagtaattaatcccttagcaaatggactctttcagacttctcatttaactcaattccctgagctagactgggattaaaattctcattttgcagtacattaaaactgaggcccagagatgtgatttgcttgaggccacacagctagatttttggtggaagtgggccttgaacacagtgtactttctgcagtttctgactgtaaaacccagtgtctgctctctgagttccatttccaagcccccctccatcttggacctatgtggtctccaccatattcacacaccaccgccaccacttgccaatgcctctcttaaagcaatatacccattcgttctcttattgggaactggatggatgaagccccaaattcagccccacccacagagaagccttcctacactcagcctctgtccacccttggcaaatctttcaagctctctcctccaggaaagtggggccccaactcagtcactccacccccttccaggtccctgaggctggttctactgtatccccatcacctccacaactccactcacccctgacggctccatccacctcaccagttggaaggcttgtggtttcagagaggagcaatgctggtcagcgctgcccagactccagtgtttacagatcaccagcatttacaaccaatccaatggccagaagcctcctctaacaagcccagaaggagttctgaaggggcagatgggggtgtgagtagtcggggagtcgggattgccagcaccctcacccttccttgggggcaagtagaggtgagaacactttccccacctccctccacagacactcctgaggacgctgcatcccacgcactgcctggtgcgtccatagagagaggatcaggtctcagcatttcatctgtgaaagaggcatggccctgggttagaaaggagggcaggagacatggaggaactggggggcacccagatggtgcagatggtttgcacacctgagcctgtctgtggtgaccattccgctcctctcccactaccctccaatctatcattccctactctctaaggccaaaatatcctgagcaaggctggcaaccccaccccaccatcccaaatgcaagcagccaggcccaggagttcctctggcccccacaggcatggagctcccagctggtgggtacagcttgagaggggggcagctccctcaggctaagctactgcccttcactgggccagccctgcctccagccctcacctctctcaccccaactctcccccaagcccctttctactcaacgggtgtagccactggtgctttgaagccttttgtttttataagatggtttttgcaaggggaccaggttctcttttcactgggaccttgcaaggaggggagtgctctcctggtttctgtgcaggcgggttgattaaagatggtgttttcttctcaaaaaaaaaaaaaaaaaaaaaaaamaamaaaaasaaaaaacaaaacaaaaacarrmaamaraaamaaacacaaaaraaarammaaaacacaacaaca

SEQ ID NO: 15 - DNA, 2639 bp, Homo sapiens
gcggccgcggagcaagaagggcgccgcggcgtgcggcccgcgcagcccccggagccatgggcaagtgcagcgggcgctgcacgctggtcgccttctgctgcctgcagctggtggctgcgctggagcggcagatctttgacttcctgggctaccagtgggctcccatcctagccaacttcctgcacatcatggcagtcatcctgggcatctttggcaccgtgcagtaccgctcccggtacctcatcctgtatgcagcctggctggtgctctgggttggctggaatgcatttatcatctgcttctacttggaggttggacagctgtcccaggaccgggacttcatcatgaccttcaacacatccctgcaccgctcctggtggatggagaatgggccaggctgcctggtgacacctgttctgaactcccgcctggctctggaggaccaccatgtcatctctgtcactggctgcctgcttgactacccctacattgaagccctcagcagcgccctgcagatcttcctggcactgttcggcttcgtgttcgcctgctacgtgagcaaagtgttcctggaggaggaggacagctttgacttcatcggcggctttgactcctacggataccaggcgccccagaagacgtcgcatttacagctgcagcctctgtacacgtcggggtagcctctgccccgcgcccaccccggcgcctcgccctgggctgaccgcagctgccgcgagctcgggccaaggcgcaggcgtgtccccctggtggcccgcgctctcactgcagcctgtgcccaaccccgcgtctgcatctggagatgcggacttggacgtggacttggacttggacttggatttgagcttggctcttcgcagcccggacttcggaggagtggggcggggcgggggaggggcaccacgggttttttgttttttgtttgtttgtttttaatctcagccttggcgtgagctggggccttcctctcttctccagcctctccctttcactcttcacccagcatcctgcccccctgtccaaaaacagcaggacatcagacccatcccatcccaccacactcactcaccagctctggggaaagctactgtgaactaggagcaggattcctgggttctaatcgcaggtccatcactgactgtgacgtctagcaaagcccttgccctctctgagcctcggtttccgcacctcaagtaattaatcccttagcaaatggactctttcagacttctcatttaactcaattccctgagctagactgggattaaaattctcattttgcagtacattaaaactgaggcccagagatgtgatttgcttgaggccacacagctagatttttggtggaagtgggccttgaacacagtgtactttctgcagtttctgactgtaaaacccagtgtctgctctctgagttccatttccaagcccccctccatcttggacctatgtggtctccaccatattcacacaccaccgccaccacttgccaatgcctctcttaaagcaatatacccattcgttctcttattgggaactggatggatgaagccccaaattcagccccacccacagagaagccttcctacactcagcctctgtccacccttggcaaatctttcaagctctctcctccaggaaagtggggccccaactcagtcactccacccccttccaggtccctgaggctggttctactgtatccccatcacctccacaactccactcacccctgacggctccatccacctcaccagttggaaggcttgtggtttcagagaggagcaatgctggtcagcgctgcccagactccagtgtttacagatcaccagcatttacaaccaatccaatggccagaagcctcctctaacaagcccagaaggagttctgaaggggcagatgggggtgtgagtagtcggggagtcgggattgccagcaccctcacccttccttgggggcaagtagaggtgagaacactttccccacctccctccacagacactcctgaggacgctgcatcccacgcactgcctggtgcgtccatagagagaggatcaggtctcagcatttcatctgtgaaagaggcatggccctgggttagaaaggagggcaggagacatggaggaactggggggcacccagatggtgcagatggtttgcacacctgagcctgtctgtggtgaccattccgctcctctcccactaccctccaatctatcattccctactctctaaggccaaaatatcctgagcaaggctggcaaccccaccccaccatcccaaatgcaactactgcccttcactgggccagccctgcctccagccctcacctctctcaccccaactctcccccaagcccctttctactcaacgggtgtagccactggtgctttgaagccttttgtttttataagatggtttttgcaaggggaccaggttctcttttcactgggaccttgcaaggaggggagtgctctcctggtttctgtgcaggcgggttgattaaagatggtgttttcttctcaaaaaaaaaaaaaaaaaaaaaaaamaamaaaaasaaaaaacaaaacaaaaacarrmaamaraaamaaacacaaaaraaarammaaaacacaacaaca

SEQ ID NO: 16 - DNA, 3125 bp, Homo sapiens
gcggccgcggagcaagaagggcgccgcggcgtgcggcccgcgcagcccccggagccatgggcaagtgcagcgggcgctgcacgctggtcgccttctgctgcctgcagctggtggctgcgctggagcggcagatctttgacttcctgggctaccagtgggctcccatcctagccaacttcctgcacatcatggcagtcatcctgggcatctttggcaccgtgcagtaccgctcccggtacctcatcctgtatgcagcctggctggtgctctgggttggctggaatgcatttatcatctgcttctacttggaggttggacagctgtcccaggaccgggacttcatcatgaccttcaacacatccctgcaccgctcctggtggatggagaatgggccaggctgcctggtgacacctgttctgaactcccgcctggctctggaggaccaccatgtcatctctgtcactggctgcctgcttgactacccctacattgaagccctcagcagcgccctgcagatcttcctggcactgttcggcttcgtgttcgcctgctacgtgagcaaagtgttcctggaggaggaggacagctttgacttcatcggcggctttgactcctacggataccaggcgccccagaagacgtcgcatttacagctgcagcctctgtacacgtcggggtagcctctgccccgcgcccaccccggcgcctcgccctgggctgaccgcagctgccgcgagctcgggccaaggcgcaggcgtgtccccctggtggcccgcgctctcactgcagcctgtgcccaaccccgcgtctgcatctggagatgcggacttggacgtggacttggacttggacttggatttgagcttggctcttcgcagcccggacttcggaggagtggggcggggcgggggaggggcaccacgggttttttgttttttgtttgtttgtttttaatctcagccttggcgtgagctggggccttcctctcttctccagcctctccctttcactcttcacccagcatcctgcccccctgtccaaaaacagcaggacatcagacccatcccatcccaccacactcactcaccagctctggggaaagctactgtgaactaggagcaggattcctgggttctaatcgcaggtccatcactgactgtgacgtctagcaaagcccttgccctctctgagcctcggtttccgcacctcaagtaattaatcccttagcaaatggactctttcagacttctcatttaactcaattccctgagctagactgggattaaaattctcattttgcagtacattaaaactgaggcccagagatgtgatttgcttgaggccacacagctagatttttggtggaagtgggccttgaacacagtgtactttctgcagtttctgactgtaaaacccagtgtctgctctctgagttccatttccaagcccccctccatcttggacctatgtggtctccaccatattcacacaccaccgccaccacttgccaatgcctctcttaaagcaatatacccattcgttctcttattgggaactggatggatgaagccccaaattcagccccacccacagagaagccttcctacactcagcctctgtccacccttggcaaatctttcaagctctctcctccaggaaagtggggccccaactcagtcactccacccccttccaggtccctgaggctggttctactgtatccccatcacctccacaactccactcacccctgacggctccatccacctcaccagttggaaggcttgtggtttcagagaggagcaatgctggtcagcgctgcccagactccagtgtttacagatcaccagcatttacaaccaatccaatggccagaagcctcctctaacaagcccagaaggagttctgaaggggcagatgggggtgtgagtagtcggggagtcgggattgccagcaccctcacccttccttgggggcaagtagaggtgagaacactttccccacctccctccacagacactcctgaggacgctgcatcccacgcactgcctggtgcgtccatagagagaggatcaggtctcagcatttcatctgtgaaagaggcatggccctgggttagaaaggagggcaggagacatggaggaactggggggcacccagatggtgcagatggtttgcacacctgagcctgtctgtggtgaccattccgctcctctcccactaccctccaatctatcattccctactctctaaggccaaaatatcctgagcaaggctggcaaccccaccccaccatcccaaatgcaactactgcccttcactgggccagccctgcctccagccctcacctctctcaccccaactctcccccaagcccctttctactcaacgggtgtagccactggtgctttgaagccttttgtttttataagatggtttttgcaaggggaccaggttctcttttcactgggaccttgcaaggaggggagtgctctcctggtttctgtgcaggcgggttgattaaagatggtgttttcttctctatcttcctgtcctgcccattgggtctatagaactttctaagtgagaagtccctgcatgagggcaggcaggaatgatttgatgttgatgttatcaaatattcctggggtggccaggcacggtggctcatgcctgtaatcccaacacttttgaaggctgaggtgggcagatcacgcgaggtcaggagtttgagaccagcctggccaacatgatgaaaccctgtctctactaaaaatacaaaaattaggcagggccgggaggctgaggaaggagaatcacttgaacttgggatgcagaggtggagtgagctcagatggcgccactctaccccagcctgggtgatagagcaagactccatctcaaaacaataaaaaagaaacaaatcctggggcactggcctgtaactctgactgggtgtgtagctttaggcaactcactctccctctctatactcatccaaaaaaaaaaaaaaaaaaaagcagaggtcaaacaaaatcagtgggttcccaaatgtggcttcataatcccttagagatcttcctacttattttcctgataaaatgcattttaagtttatgctttca

SEQ ID NO: 17 - DNA, 3233 bp, Homo sapiens
atgttgtcggagtgaaaggtaagggggagcgagagcgccagagagagaagatcggggggctgaaatccatcttcatcctaccgctccgccctcctggacccgtgggcatgcctctccctagtcagggaccaggacattcacagacaccacctccttccctctcttcacatggatcctcttcaagcttaaacctgggaggactcacgaatggcagtggaagatacatctctgctgctccaggcgctgaagccaagtaccgcagtgcaagcagcgcctccagcctcttcagcccgagcagcactcttttctcttcctctcgtttgcgatatggaatgtctgatgtcatgccttctggcaggagcaggcttttggaagattttcgaaacaaccggtaccccaatttacaactgcgggagattgctggacatataatggaattttcccaagaccagcatgggtccagattcattcagctgaaactggagcgtgccacaccagctgagcgccagcttgtcttcaatgaaatcctccaggctgcctaccaactcatggtggatgtgtttggtaattacgtcattcagaagttctttgaatttggcagtcttgaacagaagctggctttggcagaacggattcgaggccacgtcctgtcattggcactacagatgtatggctgccgtgttatccagaaagctcttgagtttattccttcagaccagcagaatgagatggttcgggaactagatggccatgtcttgaagtgtgtgaaagatcagaatggcaatcacgtggttcagaaatgcattgaatgtgtacagccccagtctttgcaatttatcatcgatgcgtttaagggacaggtatttgccttatccacacatccttatggctgccgagtgattcagagaatcctggagcactgtctccctgaccagacactccctattttagaggagcttcaccagcacacagagcagcttgtacaggatcaatatggaaattatgtaatccaacatgtactggagcacggtcgtcctgaggataaaagcaaaattgtagcagaaatccgaggcaatgtacttgtattgagtcagcacaaatttgcaagcaatgttgtggagaagtgtgttactcacgcctcacgtacggagcgcgctgtgctcatcgatgaggtgtgcaccatgaacgacggtccccacagtgccttatacaccatgatgaaggaccagtatgccaactacgtggtccagaagatgattgacgtggcggagccaggccagcggaagatcgtcatgcataagatccggccccacatcgcaactcttcgtaagtacacctatggcaagcacattctggccaagctggagaagtactacatgaagaacggtgttgacttagggcccatctgtggcccccctaatggtatcatctgaggcagtgtcacccgctgttccctcattcccgctgacctcactggcccactggcaaatccaaccagcaaccagaaatgttctagtgtagagtctgagacgggcaagtggttgctccaggattactccctcctccaaaaaaggaatcaaatccacgagtggaaaagcctttgtaaatttaattttattacacataacatgtactattttttttaattgactaattgccctgctgttttactggtgtataggatacttgtacataggtaaccaatgtacatgggaggccacatattttgttcactgttgtatctatatttcacatgtggaaactttcagggtggttggtttaacaaaaaaaaaaagctttaaaaaaaaaagaaaaaaaggaaaaggtttttagctcatttgcctggccggcaagttttgcaaatagctcttccccacctcctcattttagtaaaaaacaaacaaaaacaaaaaaacctgagaagtttgaattgtagttaaatgaccccaaactggcatttaacactgtttataaaaaatatatatatatatatatatatataatgaaaaaggtttcagagttgctaaagcttcagtttgtgacattaagtttatgaaattctaaaaaatgccttttttggagactatattatgctgaagaaggctgttcgtgaggaggagatgcgagcacccagaacgtcttttgaggctgggcgggtgtgattgtttactgcctactggatttttttctattaacattgaaaggtaaaatctgattatttagcatgagaaaaaaaaatccaactctgcttttggtcttgcttctataaatatatagtgtatacttggtgtagactttgcatatatacaaatttgtagtattttcttgttttgatgtctaatctgtatctataatgtaccctagtagtcgaacatacttttgattgtacaattgtacatttgtatacctgtaatgtaaatgtggagaagtttgaatcaacataaacacgttttttggtaagaaaagagaattagccagccctgtgcattcagtgtatattctcaccttttatggtcgtagcatatagtgttgtatattgtaaattgtaatttcaaccagaagtaaatttttttcttttgaaggaataaatgttctttatacagcctagttaatgtttaaaaagaaaaaaatagcttggttttatttgtcatctagtctcaagtatagcgagattctttctaaatgttattcaagattgagttctcactagtgtttttttaatcctaaaaaagtaatgttttgattttgtgacagtcaaaaggacgtgcaaaagtctagccttgcccgagctttccttacaatcagagcccctctcaccttgtaaagtgtgaatcgcccttcccttttgtacagaagatgaactgtattttgcattttgtctacttgtaagtgaatgtaacatactgtcaattttccttgtttgaatatagaattgtaacactacacggtgtacatttccagagccttgtgtatatttccaatgaacttttttgcaagcacacttgtaaccatatgtgtataattaacaaacctgtgtatgcttatgcctgggcaactattttttgtaactcttgtgtagattgtctctaaacaatgtgtgatctttattttgaaaaatacagaactttggaatctgaaaaaaaaaaaaaaaaaaaaaaaamaamaaaaasaaaaaacaaaacaaaaacarrmaamaraaamaaacacaaaaraaarammaaaacacaacaaca

SEQ ID NO: 18 - DNA, 3136 bp, Homo sapiens
atgttgtcggagtgaaaggtaagggggagcgagagcgccagagagagaagatcggggggctgaaatccatcttcatcctaccgctccgccctcctggacccgtgggcatgcctctccctagtcagggaccaggacattcacagacaccacctccttccctctcttcacatggatcctcttcaagcttaaacctgggaggactcacgaatggcagtggaagatacatctctgctgctccaggcgctgaagccaagtaccgcagtgcaagcagcgcctccagcctcttcagcccgagcagcactcttttctcttcctctcgtttgcgatatggaatgtctgatgtcatgccttctggcaggagcaggcttttggaagattttcgaaacaaccggtaccccaatttacaactgcgggagattgctggacatataatggaattttcccaagaccagcatgggtccagattcattcagctgaaactggagcgtgccacaccagctgagcgccagcttgtcttcaatgaaatcctccaggctgcctaccaactcatggtggatgtgtttggtaattacgtcattcagaagttctttgaatttggcagtcttgaacagaagctggctttggcagaacggattcgaggccacgtcctgtcattggcactacagatgtatggctgccgtgttatccagaaagctcttgagtttattccttcagaccagcagaatgagatggttcgggaactagatggccatgtcttgaagtgtgtgaaagatcagaatggcaatcacgtggttcagaaatgcattgaatgtgtacagccccagtctttgcaatttatcatcgatgcgtttaagggacaggtatttgccttatccacacatccttatggctgccgagtgattcagagaatcctggagcactgtctccctgaccagacactccctattttagaggagcttcaccagcacacagagcagcttgtacaggatcaatatggaaattatgtaatccaacatgtactggagcacggtcgtcctgaggataaaagcaaaattgtagcagaaatccgaggcaatgtacttgtattgagtcagcacaaatttgcaagcaatgttgtggagaagtgtgttactcacgcctcacgtacggagcgcgctgtgctcatcgatgaggtgtgcaccatgaacgacggtccccacagtgccttatacaccatgatgaaggaccagtatgccaactacgtggtccagaagatgattgacgtggcggagccaggccagcggaagatcgtcatgcataagatccggccccacatcgcaactcttcgtaagtacacctatggcaagcacattctggccaagctggagaagtactacatgaagaacggtgttgacttagggcccatctgtggcccccctaatggtatcatctgaggcagtgtcacccgctgttccctcattcccgctgacctcactggcccactggcaaatccaaccagcaaccagaaatgttctagtgtagagtctgagacgggcaagtggttgctccaggattactccctcctccaaaaaaggaatcaaatccacgagtggaaaagcctttgtaaatttaattttattacacataacatgtactattttttttaattgactaattgccctgctgttttactggtgtataggatacttgtacataggtaaccaatgtacatgggaggccacatattttgttcactgttgtatctatatttcacatgtggaaactttcagggtggttggtttaacaaaaaaaaaaagctttaaaaaaaaaagaaaaaaaggaaaaggtttttagctcatttgcctggccggcaagttttgcaaatagctcttccccacctcctcattttagtaaaaaacaaacaaaaacaaaaaaacctgagaagtttgaattgtagttaaatgaccccaaactggcatttaacactgtttataaaaaatatatatatatatatatatatataatgaaaaaggtttcagagttgctaaagcttcagtttgtgacattaagtttatgaaattctaaaaaatgccttttttggagactatattatgctgaagaaggctgttcgtgaggaggagatgcgagcacccagaacgtcttttgaggctgggcgggtgtgattgtttactgcctactggatttttttctattaacattgaaaggtaaaatctgattatttagcatgagaaaaaaaaatccaactctgcttttggtcttgcttctataaatatatagtgtatacttggtgtagactttgcatatatacaaatttgtagtattttcttgttttgatgtctaatctgtatctataatgtaccctagtagtcgaacatacttttgattgtacaattgtacatttgtatacctgtaatgtaaatgtggagaagtttgaatcaacataaacacgttttttggtaagaaaagagaattagccagccctgtgcattcagtgtatattctcaccttttatggtcgtagcatatagtgttgtatattgtaaattgtaatttcaaccagaagtaaatttttttcttttgaaggaataaatgttctttatacagcctagttaatgtttaaaaagaaaaaaatagcttggttttatttgtcatctagtctcaagtatagcgagattctttctaaatgttattcaagattgagttctcactagtgtttttttaatcctaaaaaagtaatgttttgattttgtgacagtcaaaaggacgtgcaaaagtctagccttgcccgagctttccttacaatcagagcccctctcaccttgtaaagtgtgaatcgcccttcccttttgtacagaagatgaactgtattttgcattttgtctacttgtaagtgaatgtaacatactgtcaattttccttgtttgaatatagaattgtaacactacacggtgtacatttccagagccttgtgtatatttccaatgaacttttttgcaagcacacttgtaaccatatgtgtataattaacaaacctgtgtatgcttatgcctgggcaactattttttgtaactcttgtgtagattgtctctaaacaatgtgtgatctttattttgaaaaatacagaactttggaatctg

SEQ ID NO: 19 - DNA, 2934 bp, Homo sapiens
atgttgtcggagtgaaaggtaagggggagcgagagcgccagagagagaagatcggggggctgaaatccatcttcatcctaccgctccgccctcctggacccgtgggcatgcctctccctagtcagggaccaggacattcacagacaccacctccttccctctcttcacatggatcctcttcaagcttaaacctgggaggactcacgaatggcagtggaagatacatctctgctgctccaggcgctgaagccaagtaccgcagtgcaagcagcgcctccagcctcttcagcccgagcagcactcttttctcttcctctcgtttgcgatatggaatgtctgatgtcatgccttctggcaggagcaggcttttggaagattttcgaaacaaccggtaccccaatttacaactgcgggagattgctggacatataatggaattttcccaagaccagcatgggtccagattcattcagctgaaactggagcgtgccacaccagctgagcgccagcttgtcttcaatgaaatcctccaggctgcctaccaactcatggtggatgtgtttggtaattacgtcattcagaagttctttgaatttggcagtcttgaacagaagctggctttggcagaacggattcgaggccacgtcctgtcattggcactacagatgtatggctgccgtgttatccagaaagctcttgagtttattccttcagaccagcagaatgagatggttcgggaactagatggccatgtcttgaagtgtgtgaaagatcagaatggcaatcacgtggttcagaaatgcattgaatgtgtacagccccagtctttgcaatttatcatcgatgcgtttaagggacaggtatttgccttatccacacatccttatggctgccgagtgattcagagaatcctggagcactgtctccctgaccagacactccctattttagaggagcttcaccagcacacagagcagcttgtacaggatcaatatggaaattatgtaatccaacatgtactggagcacggtcgtcctgaggataaaagcaaaattgtagcagaaatccgaggcaatgtacttgtattgagtcagcacaaatttgcaagcaatgttgtggagaagtgtgttactcacgcctcacgtacggagcgcgctgtgctcatcgatgaggtgtgcaccatgaacgacggtccccacagtgccttatacaccatgatgaaggaccagtatgccaactacgtggtccagaagatgattgacgtggcggagccaggccagcggaagatcgtcatgcataagatccggccccacatcgcaactcttcgtaagtacacctatggcaagcacattctggccaagctggagaagtactacatgaagaacggtgttgacttagggcccatctgtggcccccctaatggtatcatctgaggcagtgtcacccgctgttccctcattcccgctgacctcactggcccactggcaaatccaaccagcaaccagaaatgttctagtgtagagtctgagacgggcaagtggttgctccaggattactccctcctccaaaaaaggaatcaaatccacgagtggaaaagcctttgtaaatttaattttattacacataacatgtactattttttttaattgactaattgccctgctgttttactggtgtataggatacttgtacataggtaaccaatgtacatgggaggccacatattttgttcactgttgtatctatatttcacatgtggaaactttcagggtggttggtttaacaaaaaaaaaaagctttaaaaaaaaaagaaaaaaaggaaaaggtttttagctcatttgcctggccggcaagttttgcaaatagctcttccccacctcctcattttagtaaaaaacaaacaaaaacaaaaaaacctgagaagtttgaattgtagttaaatgaccccaaactggcatttaacactgtttataaaaaatatatatatatatatatatatataatgaaaaaggtttcagagttgctaaagcttcagtttgtgacattaagtttatgaaattctaaaaaatgccttttttggagactatattatgctgaagaaggctgttcgtgaggaggagatgcgagcacccagaacgtcttttgaggctgggcgggtgtgattgtttactgcctactggatttttttctattaacattgaaaggtaaaatctgattatttagcatgagaaaaaaaaatccaactctgcttttggtcttgcttctataaatatatagtgtatacttggtgtagactttgcatatatacaaatttgtagtattttcttgttttgatgtctaatctgtatctataatgtaccctagtagtcgaacatacttttgattgtacaattgtacatttgtatacctgtaatgtaaatgtggagaagtttgaatcaacataaacacgttttttggtaagaaaagagaattagccagccctgtgcattcagtgtatattctcaccttttatggtcgtagcatatagtgttgtatattgtaaattgtaatttcaaccagaagtaaatttttttcttttgaaggaataaatgttctttatacagcctagttaatgtttaaaaagaaaaaaatagcttggttttatttgtcatctagtctcaagtatagcgagattctttctaaatgttattcaagattgagttctcactagtgtttttttaatcctaaaaaagtaatgttttgattttgtgacagtcaaaaggacgtgcaaaagtctagccttgcccgagctttccttacaatcagagcccctctcaccttgtaaaaaacctgtgtatgcttatgcctgggcaactattttttgtaactcttgtgtagattgtctctaaacaatgtgtgatctttattttgaaaaatacagaactttggaatctg

SEQ ID NO: 20 - DNA, 5531 bp, Homo sapiens
atgttgtcggagtgaaaggtaagggggagcgagagcgccagagagagaagatcggggggctgaaatccatcttcatcctaccgctccgcccgtgttggtggaatgagcgttgcatgtgtcttgaagagaaaagcagtgctttggcaggactctttcagcccccacctgaaacatcaccctcaagaaccagctaatcccaacatgcctgttgttttgacatctggaacagggtcgcaagcgcagccacaaccagctgcaaatcaggctcttgcagctgggactcactccagccctgtcccaggatctataggagttgcaggccgttcccaggacgacgctatggtggactacttctttcagaggcagcatggtgagcagcttgggggaggaggaagtggaggaggcggctataataatagcaaacatcgatggcctactggggataacattcatgcagaacatcaggtgcgttccatggatgaactgaatcatgattttcaagcacttgctctggagggaagagcgatgggagagcagctcttgccaggtaaaaagttttgggaaacagatgaatccagcaaagatggaccaaaaggaatattcctgggtgatcaatggcgagacagtgcctggggaacatcagatcattcagtttcccagccaatcatggtgcagagaagacctggtcagagtttccatgtgaacagtgaggtcaattctgtactgtccccacgatcggagagtgggggactaggcgttagcatggtggagtatgtgttgagctcatccccgggcgattcctgtctaagaaaaggaggatttggcccaagggatgcagacagtgatgaaaacgacaaaggtgaaaagaagaacaagggtacgtttgatggagataagctaggagatttgaaggaggagggtgatgtgatggacaagaccaatggtttaccagtgcagaatgggattgatgcagacgtcaaagattttagccgtacccctggtaattgccagaactctgctaatgaagtggatcttctgggtccaaaccagaatggttctgagggcttagcccagctgaccagcaccaatggtgccaagcctgtggaggatttctccaacatggagtcccagagtgtccccttggaccccatggaacatgtgggcatggagcctcttcagtttgattattcaggcacgcaggtacctgtggactcagcagcagcaactgtgggactttttgactacaattctcaacaacagctgttccaaagacctaatgcgcttgctgtccagcagttgacagctgctcagcagcagcagtatgcactggcagctgctcatcagccgcacatcggtttagctcccgctgcgtttgtccccaatccatacatcatcagcgctgctcccccagggacggacccctacacagctggattggctgcagcagcgacactaggcccagctgtggtccctcaccagtattatggagttactccctggggagtctaccctgccagtcttttccagcagcaagctgccgctgccgctgcagcaactaattcagctaatcaacagaccaccccacaggctcagcaaggacagcagcaggttctccgtggaggagccagccaacgtcctttgaccccaaaccagaaccagcagggacagcaaacggatccccttgtggcagctgcagcagtgaattctgcccttgcatttggacaaggtctggcagcaggcatgccaggttatccggtgttggctcctgctgcttactatgaccaaactggtgcccttgtagtgaatgcaggcgcgagaaatggtcttggagctcctgttcgacttgtagctcctgccccagtcatcattagttcctcagctgcacaagcaggtgagcgcacatctgagtggactcctgccagagatctaaaagtggcgactgatagtgagattcttaaactgttgcagcagccgcagcttcagcaaatggagcagctggtggtcttgctggaacaacaaatggaccatttcgccctttaggaacacagcagcctcagccccagccccagcagcagcccaataacaacctggcatccagttctttctacggcaacaactctctgaacagcaattcacagagcagctccctcttctcccagggctctgcccagcctgccaacacatccttgggattcggaagtagcagttctctcggcgccaccctgggatccgcccttggagggtttggaacagcagttgcaaactccaacactggcagtggctcccgccgtgactccctgactggcagcagtgacctttataagaggacatcgagcagcttgacccccattggacacagtttttataacggccttagcttttcctcctctcctggacccgtgggcatgcctctccctagtcagggaccaggacattcacagacaccacctccttccctctcttcacatggatcctcttcaagcttaaacctgggaggactcacgaatggcagtggaagatacatctctgctgctccaggcgctgaagccaagtaccgcagtgcaagcagcgcctccagcctcttcagcccgagcagcactcttttctcttcctctcgtttgcgatatggaatgtctgatgtcatgccttctggcaggagcaggcttttggaagattttcgaaacaaccggtaccccaatttacaactgcgggagattgctggacatataatggaattttcccaagaccagcatgggtccagattcattcagctgaaactggagcgtgccacaccagctgagcgccagcttgtcttcaatgaaatcctccaggctgcctaccaactcatggtggatgtgtttggtaattacgtcattcagaagttctttgaatttggcagtcttgaacagaagctggctttggcagaacggattcgaggccacgtcctgtcattggcactacagatgtatggctgccgtgttatccagaaagctcttgagtttattccttcagaccagcagaatgagatggttcgggaactagatggccatgtcttgaagtgtgtgaaagatcagaatggcaatcacgtggttcagaaatgcattgaatgtgtacagccccagtctttgcaatttatcatcgatgcgtttaagggacaggtatttgccttatccacacatccttatggctgccgagtgattcagagaatcctggagcactgtctccctgaccagacactccctattttagaggagcttcaccagcacacagagcagcttgtacaggatcaatatggaaattatgtaatccaacatgtactggagcacggtcgtcctgaggataaaagcaaaattgtagcagaaatccgaggcaatgtacttgtattgagtcagcacaaatttgcaagcaatgttgtggagaagtgtgttactcacgcctcacgtacggagcgcgctgtgctcatcgatgaggtgtgcaccatgaacgacggtccccacagtgccttatacaccatgatgaaggaccagtatgccaactacgtggtccagaagatgattgacgtggcggagccaggccagcggaagatcgtcatgcataagatccggccccacatcgcaactcttcgtaagtacacctatggcaagcacattctggccaagctggagaagtactacatgaagaacggtgttgacttagggcccatctgtggcccccctaatggtatcatctgaggcagtgtcacccgctgttccctcattcccgctgacctcactggcccactggcaaatccaaccagcaaccagaaatgttctagtgtagagtctgagacgggcaagtggttgctccaggattactccctcctccaaaaaaggaatcaaatccacgagtggaaaagcctttgtaaatttaattttattacacataacatgtactattttttttaattgactaattgccctgctgttttactggtgtataggatacttgtacataggtaaccaatgtacatgggaggccacatattttgttcactgttgtatctatatttcacatgtggaaactttcagggtggttggtttaacaaaaaaaaaaagctttaaaaaaaaaagaaaaaaaggaaaaggtttttagctcatttgcctggccggcaagttttgcaaatagctcttccccacctcctcattttagtaaaaaacaaacaaaaacaaaaaaacctgagaagtttgaattgtagttaaatgaccccaaactggcatttaacactgtttataaaaaatatatatatatatatatatatataatgaaaaaggtttcagagttgctaaagcttcagtttgtgacattaagtttatgaaattctaaaaaatgccttttttggagactatattatgctgaagaaggctgttcgtgaggaggagatgcgagcacccagaacgtcttttgaggctgggcgggtgtgattgtttactgcctactggatttttttctattaacattgaaaggtaaaatctgattatttagcatgagaaaaaaaaatccaactctgcttttggtcttgcttctataaatatatagtgtatacttggtgtagactttgcatatatacaaatttgtagtattttcttgttttgatgtctaatctgtatctataatgtaccctagtagtcgaacatacttttgattgtacaattgtacatttgtatacctgtaatgtaaatgtggagaagtttgaatcaacataaacacgttttttggtaagaaaagagaattagccagccctgtgcattcagtgtatattctcaccttttatggtcgtagcatatagtgttgtatattgtaaattgtaatttcaaccagaagtaaatttttttcttttgaaggaataaatgttctttatacagcctagttaatgtttaaaaagaaaaaaatagcttggttttatttgtcatctagtctcaagtatagcgagattctttctaaatgttattcaagattgagttctcactagtgtttttttaatcctaaaaaagtaatgttttgattttgtgacagtcaaaaggacgtgcaaaagtctagccttgcccgagctttccttacaatcagagcccctctcaccttgtaaagtgtgaatcgcccttcccttttgtacagaagatgaactgtattttgcattttgtctacttgtaagtgaatgtaacatactgtcaattttccttgtttgaatatagaattgtaacactacacggtgtacatttccagagccttgtgtatatttccaatgaacttttttgcaagcacacttgtaaccatatgtgtataattaacaaacctgtgtatgcttatgcctgggcaactattttttgtaactcttgtgtagattgtctctaaacaatgtgtgatctttattttgaaaaatacagaactttggaatctgaaaaaaaaaaaaaaaaaaaaaaaamaamaaaaasaaaaaacaaaacaaaaacarrmaamaraaamaaacacaaaaraaarammaaaacacaacaaca

SEQ ID NO: 21 - DNA, 4976 bp, Homo sapiens
atgttgtcggagtgaaaggtaagggggagcgagagcgccagagagagaagatcggggggctgaaatccatcttcatcctaccgctccgcccgtgttggtggaatgagcgttgcatgtgtcttgaagagaaaagcagtgctttggcaggactctttcagcccccacctgaaacatcaccctcaagaaccagctaatcccaacatgcctgttgttttgacatctggaacagggtcgcaagcgcagccacaaccagctgcaaatcaggctcttgcagctgggactcactccagccctgtcccaggatctataggagttgcaggccgttcccaggacgacgctatggtggactacttctttcagaggcagcatggtgagcagcttgggggaggaggaagtggaggaggcggctataataatagcaaacatcgatggcctactggggataacattcatgcagaacatcaggtgcgttccatggatgaactgaatcatgattttcaagcacttgctctggagggaagagcgatgggagagggcccaagggatgcagacagtgatgaaaacgacaaaggtgaaaagaagaacaagggtacgtttgatggagataagctaggagatttgaaggaggagggtgatgtgatggacaagaccaatggtttaccagtgcagaatgggattgatgcagacgtcaaagattttagccgtacccctggtaattgccagaactctgctaatgaagtggatcttctgggtccaaaccagaatggttctgagggcttagcccagctgaccagcaccaatggtgccaagcctgtggaggatttctccaacatggagtcccagagtgtccccttggaccccatggaacatgtgggcatggagcctcttcagtttgattattcaggcacgcaggtacctgtggactcagcagcagcaactgtgggactttttgactacaattctcaacaacagctgttccaaagacctaatgcgcttgctgtccagcagttgacagctgctcagcagcagcagtatgcactggcagctgctcatcagccgcacatcggcccagctgtggtccctcaccagtattatggagttactccctggggagtctaccctgccagtcttttccagcagcaagctgccgctgccgctgcagcaactaattcagctaatcaacagaccaccccacaggctcagcaaggacagcagcaggttctccgtggaggagccagccaacgtcctttgaccccaaaccagaaccagcagggacagcaaacggatccccttgtggcagctgcagcagtgaattctgcccttgcatttggacaaggtctggcagcaggcatgccaggttatccggtgttggctcctgctgcttactatgaccaaactggtgcccttgtagtgaatgcaggcgcgagaaatggtcttggagctcctgttcgacttgtagctcctgccccagtcatcattagttcctcagctgcacaagcagctgttgcagcagccgcagcttcagcaaatggagcagctggtggtcttgctggaacaacaaatggaccatttcgccctttaggaacacagcagcctcagccccagccccagcagcagcccaataacaacctggcatccagttctttctacggcaacaactctctgaacagcaattcacagagcagctccctcttctcccagggctctgcccagcctgccaacacatccttgggattcggaagtagcagttctctcggcgccaccctgggatccgcccttggagggtttggaacagcagttgcaaactccaacactggcagtggctcccgccgtgactccctgactggcagcagtgacctttataagaggacatcgagcagcttgacccccattggacacagtttttataacggccttagcttttcctcctctcctggacccgtgggcatgcctctccctagtcagggaccaggacattcacagacaccacctccttccctctcttcacatggatcctcttcaagcttaaacctgggaggactcacgaatggcagtggaagatacatctctgctgctccaggcgctgaagccaagtaccgcagtgcaagcagcgcctccagcctcttcagcccgagcagcactcttttctcttcctctcgtttgcgatatggaatgtctgatgtcatgccttctggcaggagcaggcttttggaagattttcgaaacaaccggtaccccaatttacaactgcgggagattgctggacatataatggaattttcccaagaccagcatgggtccagattcattcagctgaaactggagcgtgccacaccagctgagcgccagcttgtcttcaatgaaatcctccaggctgcctaccaactcatggtggatgtgtttggtaattacgtcattcagaagttctttgaatttggcagtcttgaacagaagctggctttggcagaacggattcgaggccacgtcctgtcattggcactacagatgtatggctgccgtgttatccagaaagctcttgagtttattccttcagaccagcagaatgagatggttcgggaactagatggccatgtcttgaagtgtgtgaaagatcagaatggcaatcacgtggttcagaaatgcattgaatgtgtacagccccagtctttgcaatttatcatcgatgcgtttaagggacaggtatttgccttatccacacatccttatggctgccgagtgattcagagaatcctggagcactgtctccctgaccagacactccctattttagaggagcttcaccagcacacagagcagcttgtacaggatcaatatggaaattatgtaatccaacatgtactggagcacggtcgtcctgaggataaaagcaaaattgtagcagaaatccgaggcaatgtacttgtattgagtcagcacaaatttgcaagcaatgttgtggagaagtgtgttactcacgcctcacgtacggagcgcgctgtgctcatcgatgaggtgtgcaccatgaacgacggtccccacagtgccttatacaccatgatgaaggaccagtatgccaactacgtggtccagaagatgattgacgtggcggagccaggccagcggaagatcgtcatgcataagatccggccccacatcgcaactcttcgtaagtacacctatggcaagcacattctggccaagctggagaagtactacatgaagaacggtgttgacttagggcccatctgtggcccccctaatggtatcatctgaggcagtgtcacccgctgttccctcattcccgctgacctcactggcccactggcaaatccaaccagcaaccagaaatgttctagtgtagagtctgagacgggcaagtggttgctccaggattactccctcctccaaaaaaggaatcaaatccacgagtggaaaagcctttgtaaatttaattttattacacataacatgtactattttttttaattgactaattgccctgctgttttactggtgtataggatacttgtacataggtaaccaatgtacatgggaggccacatattttgttcactgttgtatctatatttcacatgtggaaactttcagggtggttggtttaacaaaaaaaaaaagctttaaaaaaaaaagaaaaaaaggaaaaggtttttagctcatttgcctggccggcaagttttgcaaatagctcttccccacctcctcattttagtaaaaaacaaacaaaaacaaaaaaacctgagaagtttgaattgtagttaaatgaccccaaactggcatttaacactgtttataaaaaatatatatatatatatatatatataatgaaaaaggtttcagagttgctaaagcttcagtttgtgacattaagtttatgaaattctaaaaaatgccttttttggagactatattatgctgaagaaggctgttcgtgaggaggagatgcgagcacccagaacgtcttttgaggctgggcgggtgtgattgtttactgcctactggatttttttctattaacattgaaaggtaaaatctgattatttagcatgagaaaaaaaaatccaactctgcttttggtcttgcttctataaatatatagtgtatacttggtgtagactttgcatatatacaaatttgtagtattttcttgttttgatgtctaatctgtatctataatgtaccctagtagtcgaacatacttttgattgtacaattgtacatttgtatacctgtaatgtaaatgtggagaagtttgaatcaacataaacacgttttttggtaagaaaagagaattagccagccctgtgcattcagtgtatattctcaccttttatggtcgtagcatatagtgttgtatattgtaaattgtaatttcaaccagaagtaaatttttttcttttgaaggaataaatgttctttatacagcctagttaatgtttaaaaagaaaaaaatagcttggttttatttgtcatctagtctcaagtatagcgagattctttctaaatgttattcaagattgagttctcactagtgtttttttaatcctaaaaaagtaatgttttgattttgtgacagtcaaaaggacgtgcaaaagtctagccttgcccgagctttccttacaatcagagcccctctcaccttgtaaagtgtgaatcgcccttcccttttgtacagaagatgaactgtattttgcattttgtctacttgtaagtgaatgtaacatactgtcaattttccttgtttgaatatagaattgtaacactacacggtgtacatttccagagccttgtgtatatttccaatgaacttttttgcaagcacacttgtaaccatatgtgtataattaacaaacctgtgtatgcttatgcctgggcaactattttttgtaactcttgtgtagattgtctctaaacaatgtgtgatctttattttgaaaaatacagaactttggaatctg

SEQ ID NO: 22 - DNA, 4774 bp, Homo sapiens
atgttgtcggagtgaaaggtaagggggagcgagagcgccagagagagaagatcggggggctgaaatccatcttcatcctaccgctccgcccgtgttggtggaatgagcgttgcatgtgtcttgaagagaaaagcagtgctttggcaggactctttcagcccccacctgaaacatcaccctcaagaaccagctaatcccaacatgcctgttgttttgacatctggaacagggtcgcaagcgcagccacaaccagctgcaaatcaggctcttgcagctgggactcactccagccctgtcccaggatctataggagttgcaggccgttcccaggacgacgctatggtggactacttctttcagaggcagcatggtgagcagcttgggggaggaggaagtggaggaggcggctataataatagcaaacatcgatggcctactggggataacattcatgcagaacatcaggtgcgttccatggatgaactgaatcatgattttcaagcacttgctctggagggaagagcgatgggagagggcccaagggatgcagacagtgatgaaaacgacaaaggtgaaaagaagaacaagggtacgtttgatggagataagctaggagatttgaaggaggagggtgatgtgatggacaagaccaatggtttaccagtgcagaatgggattgatgcagacgtcaaagattttagccgtacccctggtaattgccagaactctgctaatgaagtggatcttctgggtccaaaccagaatggttctgagggcttagcccagctgaccagcaccaatggtgccaagcctgtggaggatttctccaacatggagtcccagagtgtccccttggaccccatggaacatgtgggcatggagcctcttcagtttgattattcaggcacgcaggtacctgtggactcagcagcagcaactgtgggactttttgactacaattctcaacaacagctgttccaaagacctaatgcgcttgctgtccagcagttgacagctgctcagcagcagcagtatgcactggcagctgctcatcagccgcacatcggcccagctgtggtccctcaccagtattatggagttactccctggggagtctaccctgccagtcttttccagcagcaagctgccgctgccgctgcagcaactaattcagctaatcaacagaccaccccacaggctcagcaaggacagcagcaggttctccgtggaggagccagccaacgtcctttgaccccaaaccagaaccagcagggacagcaaacggatccccttgtggcagctgcagcagtgaattctgcccttgcatttggacaaggtctggcagcaggcatgccaggttatccggtgttggctcctgctgcttactatgaccaaactggtgcccttgtagtgaatgcaggcgcgagaaatggtcttggagctcctgttcgacttgtagctcctgccccagtcatcattagttcctcagctgcacaagcagctgttgcagcagccgcagcttcagcaaatggagcagctggtggtcttgctggaacaacaaatggaccatttcgccctttaggaacacagcagcctcagccccagccccagcagcagcccaataacaacctggcatccagttctttctacggcaacaactctctgaacagcaattcacagagcagctccctcttctcccagggctctgcccagcctgccaacacatccttgggattcggaagtagcagttctctcggcgccaccctgggatccgcccttggagggtttggaacagcagttgcaaactccaacactggcagtggctcccgccgtgactccctgactggcagcagtgacctttataagaggacatcgagcagcttgacccccattggacacagtttttataacggccttagcttttcctcctctcctggacccgtgggcatgcctctccctagtcagggaccaggacattcacagacaccacctccttccctctcttcacatggatcctcttcaagcttaaacctgggaggactcacgaatggcagtggaagatacatctctgctgctccaggcgctgaagccaagtaccgcagtgcaagcagcgcctccagcctcttcagcccgagcagcactcttttctcttcctctcgtttgcgatatggaatgtctgatgtcatgccttctggcaggagcaggcttttggaagattttcgaaacaaccggtaccccaatttacaactgcgggagattgctggacatataatggaattttcccaagaccagcatgggtccagattcattcagctgaaactggagcgtgccacaccagctgagcgccagcttgtcttcaatgaaatcctccaggctgcctaccaactcatggtggatgtgtttggtaattacgtcattcagaagttctttgaatttggcagtcttgaacagaagctggctttggcagaacggattcgaggccacgtcctgtcattggcactacagatgtatggctgccgtgttatccagaaagctcttgagtttattccttcagaccagcagaatgagatggttcgggaactagatggccatgtcttgaagtgtgtgaaagatcagaatggcaatcacgtggttcagaaatgcattgaatgtgtacagccccagtctttgcaatttatcatcgatgcgtttaagggacaggtatttgccttatccacacatccttatggctgccgagtgattcagagaatcctggagcactgtctccctgaccagacactccctattttagaggagcttcaccagcacacagagcagcttgtacaggatcaatatggaaattatgtaatccaacatgtactggagcacggtcgtcctgaggataaaagcaaaattgtagcagaaatccgaggcaatgtacttgtattgagtcagcacaaatttgcaagcaatgttgtggagaagtgtgttactcacgcctcacgtacggagcgcgctgtgctcatcgatgaggtgtgcaccatgaacgacggtccccacagtgccttatacaccatgatgaaggaccagtatgccaactacgtggtccagaagatgattgacgtggcggagccaggccagcggaagatcgtcatgcataagatccggccccacatcgcaactcttcgtaagtacacctatggcaagcacattctggccaagctggagaagtactacatgaagaacggtgttgacttagggcccatctgtggcccccctaatggtatcatctgaggcagtgtcacccgctgttccctcattcccgctgacctcactggcccactggcaaatccaaccagcaaccagaaatgttctagtgtagagtctgagacgggcaagtggttgctccaggattactccctcctccaaaaaaggaatcaaatccacgagtggaaaagcctttgtaaatttaattttattacacataacatgtactattttttttaattgactaattgccctgctgttttactggtgtataggatacttgtacataggtaaccaatgtacatgggaggccacatattttgttcactgttgtatctatatttcacatgtggaaactttcagggtggttggtttaacaaaaaaaaaaagctttaaaaaaaaaagaaaaaaaggaaaaggtttttagctcatttgcctggccggcaagttttgcaaatagctcttccccacctcctcattttagtaaaaaacaaacaaaaacaaaaaaacctgagaagtttgaattgtagttaaatgaccccaaactggcatttaacactgtttataaaaaatatatatatatatatatatatataatgaaaaaggtttcagagttgctaaagcttcagtttgtgacattaagtttatgaaattctaaaaaatgccttttttggagactatattatgctgaagaaggctgttcgtgaggaggagatgcgagcacccagaacgtcttttgaggctgggcgggtgtgattgtttactgcctactggatttttttctattaacattgaaaggtaaaatctgattatttagcatgagaaaaaaaaatccaactctgcttttggtcttgcttctataaatatatagtgtatacttggtgtagactttgcatatatacaaatttgtagtattttcttgttttgatgtctaatctgtatctataatgtaccctagtagtcgaacatacttttgattgtacaattgtacatttgtatacctgtaatgtaaatgtggagaagtttgaatcaacataaacacgttttttggtaagaaaagagaattagccagccctgtgcattcagtgtatattctcaccttttatggtcgtagcatatagtgttgtatattgtaaattgtaatttcaaccagaagtaaatttttttcttttgaaggaataaatgttctttatacagcctagttaatgtttaaaaagaaaaaaatagcttggttttatttgtcatctagtctcaagtatagcgagattctttctaaatgttattcaagattgagttctcactagtgtttttttaatcctaaaaaagtaatgttttgattttgtgacagtcaaaaggacgtgcaaaagtctagccttgcccgagctttccttacaatcagagcccctctcaccttgtaaaaaacctgtgtatgcttatgcctgggcaactattttttgtaactcttgtgtagattgtctctaaacaatgtgtgatctttattttgaaaaatacagaactttggaatctg

SEQ ID NO: 23 - DNA, 5368 bp, Homo sapiens
atgttgtcggagtgaaaggtaagggggagcgagagcgccagagagagaagatcggggggctgaaatccatcttcatcctaccgctccgcccgtgttggtggaatgagcgttgcatgtgtcttgaagagaaaagcagtgctttggcaggactctttcagcccccacctgaaacatcaccctcaagaaccagctaatcccaacatgcctgttgttttgacatctggaacagggtcgcaagcgcagccacaaccagctgcaaatcaggctcttgcagctgggactcactccagccctgtcccaggatctataggagttgcaggccgttcccaggacgacgctatggtggactacttctttcagaggcagcatggtgcgttccatggatgaactgaatcatgattttcaagcacttgctctggagggaagagcgatgggagagcagctcttgccaggtaaaaagttttgggaaacagatgaatccagcaaagatggaccaaaaggaatattcctgggtgatcaatggcgagacagtgcctggggaacatcagatcattcagtttcccagccaatcatggtgcagagaagacctggtcagagtttccatgtgaacagtgaggtcaattctgtactgtccccacgatcggagagtgggggactaggcgttagcatggtggagtatgtgttgagctcatccccgggcgattcctgtctaagaaaaggaggatttggcccaagggatgcagacagtgatgaaaacgacaaaggtgaaaagaagaacaagggtacgtttgatggagataagctaggagatttgaaggaggagggtgatgtgatggacaagaccaatggtttaccagtgcagaatgggattgatgcagacgtcaaagattttagccgtacccctggtaattgccagaactctgctaatgaagtggatcttctgggtccaaaccagaatggttctgagggcttagcccagctgaccagcaccaatggtgccaagcctgtggaggatttctccaacatggagtcccagagtgtccccttggaccccatggaacatgtgggcatggagcctcttcagtttgattattcaggcacgcaggtacctgtggactcagcagcagcaactgtgggactttttgactacaattctcaacaacagctgttccaaagacctaatgcgcttgctgtccagcagttgacagctgctcagcagcagcagtatgcactggcagctgctcatcagccgcacatcggtttagctcccgctgcgtttgtccccaatccatacatcatcagcgctgctcccccagggacggacccctacacagctggattggctgcagcagcgacactaggcccagctgtggtccctcaccagtattatggagttactccctggggagtctaccctgccagtcttttccagcagcaagctgccgctgccgctgcagcaactaattcagctaatcaacagaccaccccacaggctcagcaaggacagcagcaggttctccgtggaggagccagccaacgtcctttgaccccaaaccagaaccagcagggacagcaaacggatccccttgtggcagctgcagcagtgaattctgcccttgcatttggacaaggtctggcagcaggcatgccaggttatccggtgttggctcctgctgcttactatgaccaaactggtgcccttgtagtgaatgcaggcgcgagaaatggtcttggagctcctgttcgacttgtagctcctgccccagtcatcattagttcctcagctgcacaagcagctgttgcagcagccgcagcttcagcaaatggagcagctggtggtcttgctggaacaacaaatggaccatttcgccctttaggaacacagcagcctcagccccagccccagcagcagcccaataacaacctggcatccagttctttctacggcaacaactctctgaacagcaattcacagagcagctccctcttctcccagggctctgcccagcctgccaacacatccttgggattcggaagtagcagttctctcggcgccaccctgggatccgcccttggagggtttggaacagcagttgcaaactccaacactggcagtggctcccgccgtgactccctgactggcagcagtgacctttataagaggacatcgagcagcttgacccccattggacacagtttttataacggccttagcttttcctcctctcctggacccgtgggcatgcctctccctagtcagggaccaggacattcacagacaccacctccttccctctcttcacatggatcctcttcaagcttaaacctgggaggactcacgaatggcagtggaagatacatctctgctgctccaggcgctgaagccaagtaccgcagtgcaagcagcgcctccagcctcttcagcccgagcagcactcttttctcttcctctcgtttgcgatatggaatgtctgatgtcatgccttctggcaggagcaggcttttggaagattttcgaaacaaccggtaccccaatttacaactgcgggagattgctggacatataatggaattttcccaagaccagcatgggtccagattcattcagctgaaactggagcgtgccacaccagctgagcgccagcttgtcttcaatgaaatcctccaggctgcctaccaactcatggtggatgtgtttggtaattacgtcattcagaagttctttgaatttggcagtcttgaacagaagctggctttggcagaacggattcgaggccacgtcctgtcattggcactacagatgtatggctgccgtgttatccagaaagctcttgagtttattccttcagaccagcagaatgagatggttcgggaactagatggccatgtcttgaagtgtgtgaaagatcagaatggcaatcacgtggttcagaaatgcattgaatgtgtacagccccagtctttgcaatttatcatcgatgcgtttaagggacaggtatttgccttatccacacatccttatggctgccgagtgattcagagaatcctggagcactgtctccctgaccagacactccctattttagaggagcttcaccagcacacagagcagcttgtacaggatcaatatggaaattatgtaatccaacatgtactggagcacggtcgtcctgaggataaaagcaaaattgtagcagaaatccgaggcaatgtacttgtattgagtcagcacaaatttgcaagcaatgttgtggagaagtgtgttactcacgcctcacgtacggagcgcgctgtgctcatcgatgaggtgtgcaccatgaacgacggtccccacagtgccttatacaccatgatgaaggaccagtatgccaactacgtggtccagaagatgattgacgtggcggagccaggccagcggaagatcgtcatgcataagatccggccccacatcgcaactcttcgtaagtacacctatggcaagcacattctggccaagctggagaagtactacatgaagaacggtgttgacttagggcccatctgtggcccccctaatggtatcatctgaggcagtgtcacccgctgttccctcattcccgctgacctcactggcccactggcaaatccaaccagcaaccagaaatgttctagtgtagagtctgagacgggcaagtggttgctccaggattactccctcctccaaaaaaggaatcaaatccacgagtggaaaagcctttgtaaatttaattttattacacataacatgtactattttttttaattgactaattgccctgctgttttactggtgtataggatacttgtacataggtaaccaatgtacatgggaggccacatattttgttcactgttgtatctatatttcacatgtggaaactttcagggtggttggtttaacaaaaaaaaaaagctttaaaaaaaaaagaaaaaaaggaaaaggtttttagctcatttgcctggccggcaagttttgcaaatagctcttccccacctcctcattttagtaaaaaacaaacaaaaacaaaaaaacctgagaagtttgaattgtagttaaatgaccccaaactggcatttaacactgtttataaaaaatatatatatatatatatatatataatgaaaaaggtttcagagttgctaaagcttcagtttgtgacattaagtttatgaaattctaaaaaatgccttttttggagactatattatgctgaagaaggctgttcgtgaggaggagatgcgagcacccagaacgtcttttgaggctgggcgggtgtgattgtttactgcctactggatttttttctattaacattgaaaggtaaaatctgattatttagcatgagaaaaaaaaatccaactctgcttttggtcttgcttctataaatatatagtgtatacttggtgtagactttgcatatatacaaatttgtagtattttcttgttttgatgtctaatctgtatctataatgtaccctagtagtcgaacatacttttgattgtacaattgtacatttgtatacctgtaatgtaaatgtggagaagtttgaatcaacataaacacgttttttggtaagaaaagagaattagccagccctgtgcattcagtgtatattctcaccttttatggtcgtagcatatagtgttgtatattgtaaattgtaatttcaaccagaagtaaatttttttcttttgaaggaataaatgttctttatacagcctagttaatgtttaaaaagaaaaaaatagcttggttttatttgtcatctagtctcaagtatagcgagattctttctaaatgttattcaagattgagttctcactagtgtttttttaatcctaaaaaagtaatgttttgattttgtgacagtcaaaaggacgtgcaaaagtctagccttgcccgagctttccttacaatcagagcccctctcaccttgtaaagtgtgaatcgcccttcccttttgtacagaagatgaactgtattttgcattttgtctacttgtaagtgaatgtaacatactgtcaattttccttgtttgaatatagaattgtaacactacacggtgtacatttccagagccttgtgtatatttccaatgaacttttttgcaagcacacttgtaaccatatgtgtataattaacaaacctgtgtatgcttatgcctgggcaactattttttgtaactcttgtgtagattgtctctaaacaatgtgtgatctttattttgaaaaatacagaactttggaatctgaaaaaaaaaaaaaaaaaaaaaaaamaamaaaaasaaaaaacaaaacaaaaacarrmaamaraaamaaacacaaaaraaarammaaaacacaacaaca

SEQ ID NO: 24 - DNA, 5271 bp, Homo sapiens
atgttgtcggagtgaaaggtaagggggagcgagagcgccagagagagaagatcggggggctgaaatccatcttcatcctaccgctccgcccgtgttggtggaatgagcgttgcatgtgtcttgaagagaaaagcagtgctttggcaggactctttcagcccccacctgaaacatcaccctcaagaaccagctaatcccaacatgcctgttgttttgacatctggaacagggtcgcaagcgcagccacaaccagctgcaaatcaggctcttgcagctgggactcactccagccctgtcccaggatctataggagttgcaggccgttcccaggacgacgctatggtggactacttctttcagaggcagcatggtgcgttccatggatgaactgaatcatgattttcaagcacttgctctggagggaagagcgatgggagagcagctcttgccaggtaaaaagttttgggaaacagatgaatccagcaaagatggaccaaaaggaatattcctgggtgatcaatggcgagacagtgcctggggaacatcagatcattcagtttcccagccaatcatggtgcagagaagacctggtcagagtttccatgtgaacagtgaggtcaattctgtactgtccccacgatcggagagtgggggactaggcgttagcatggtggagtatgtgttgagctcatccccgggcgattcctgtctaagaaaaggaggatttggcccaagggatgcagacagtgatgaaaacgacaaaggtgaaaagaagaacaagggtacgtttgatggagataagctaggagatttgaaggaggagggtgatgtgatggacaagaccaatggtttaccagtgcagaatgggattgatgcagacgtcaaagattttagccgtacccctggtaattgccagaactctgctaatgaagtggatcttctgggtccaaaccagaatggttctgagggcttagcccagctgaccagcaccaatggtgccaagcctgtggaggatttctccaacatggagtcccagagtgtccccttggaccccatggaacatgtgggcatggagcctcttcagtttgattattcaggcacgcaggtacctgtggactcagcagcagcaactgtgggactttttgactacaattctcaacaacagctgttccaaagacctaatgcgcttgctgtccagcagttgacagctgctcagcagcagcagtatgcactggcagctgctcatcagccgcacatcggtttagctcccgctgcgtttgtccccaatccatacatcatcagcgctgctcccccagggacggacccctacacagctggattggctgcagcagcgacactaggcccagctgtggtccctcaccagtattatggagttactccctggggagtctaccctgccagtcttttccagcagcaagctgccgctgccgctgcagcaactaattcagctaatcaacagaccaccccacaggctcagcaaggacagcagcaggttctccgtggaggagccagccaacgtcctttgaccccaaaccagaaccagcagggacagcaaacggatccccttgtggcagctgcagcagtgaattctgcccttgcatttggacaaggtctggcagcaggcatgccaggttatccggtgttggctcctgctgcttactatgaccaaactggtgcccttgtagtgaatgcaggcgcgagaaatggtcttggagctcctgttcgacttgtagctcctgccccagtcatcattagttcctcagctgcacaagcagctgttgcagcagccgcagcttcagcaaatggagcagctggtggtcttgctggaacaacaaatggaccatttcgccctttaggaacacagcagcctcagccccagccccagcagcagcccaataacaacctggcatccagttctttctacggcaacaactctctgaacagcaattcacagagcagctccctcttctcccagggctctgcccagcctgccaacacatccttgggattcggaagtagcagttctctcggcgccaccctgggatccgcccttggagggtttggaacagcagttgcaaactccaacactggcagtggctcccgccgtgactccctgactggcagcagtgacctttataagaggacatcgagcagcttgacccccattggacacagtttttataacggccttagcttttcctcctctcctggacccgtgggcatgcctctccctagtcagggaccaggacattcacagacaccacctccttccctctcttcacatggatcctcttcaagcttaaacctgggaggactcacgaatggcagtggaagatacatctctgctgctccaggcgctgaagccaagtaccgcagtgcaagcagcgcctccagcctcttcagcccgagcagcactcttttctcttcctctcgtttgcgatatggaatgtctgatgtcatgccttctggcaggagcaggcttttggaagattttcgaaacaaccggtaccccaatttacaactgcgggagattgctggacatataatggaattttcccaagaccagcatgggtccagattcattcagctgaaactggagcgtgccacaccagctgagcgccagcttgtcttcaatgaaatcctccaggctgcctaccaactcatggtggatgtgtttggtaattacgtcattcagaagttctttgaatttggcagtcttgaacagaagctggctttggcagaacggattcgaggccacgtcctgtcattggcactacagatgtatggctgccgtgttatccagaaagctcttgagtttattccttcagaccagcagaatgagatggttcgggaactagatggccatgtcttgaagtgtgtgaaagatcagaatggcaatcacgtggttcagaaatgcattgaatgtgtacagccccagtctttgcaatttatcatcgatgcgtttaagggacaggtatttgccttatccacacatccttatggctgccgagtgattcagagaatcctggagcactgtctccctgaccagacactccctattttagaggagcttcaccagcacacagagcagcttgtacaggatcaatatggaaattatgtaatccaacatgtactggagcacggtcgtcctgaggataaaagcaaaattgtagcagaaatccgaggcaatgtacttgtattgagtcagcacaaatttgcaagcaatgttgtggagaagtgtgttactcacgcctcacgtacggagcgcgctgtgctcatcgatgaggtgtgcaccatgaacgacggtccccacagtgccttatacaccatgatgaaggaccagtatgccaactacgtggtccagaagatgattgacgtggcggagccaggccagcggaagatcgtcatgcataagatccggccccacatcgcaactcttcgtaagtacacctatggcaagcacattctggccaagctggagaagtactacatgaagaacggtgttgacttagggcccatctgtggcccccctaatggtatcatctgaggcagtgtcacccgctgttccctcattcccgctgacctcactggcccactggcaaatccaaccagcaaccagaaatgttctagtgtagagtctgagacgggcaagtggttgctccaggattactccctcctccaaaaaaggaatcaaatccacgagtggaaaagcctttgtaaatttaattttattacacataacatgtactattttttttaattgactaattgccctgctgttttactggtgtataggatacttgtacataggtaaccaatgtacatgggaggccacatattttgttcactgttgtatctatatttcacatgtggaaactttcagggtggttggtttaacaaaaaaaaaaagctttaaaaaaaaaagaaaaaaaggaaaaggtttttagctcatttgcctggccggcaagttttgcaaatagctcttccccacctcctcattttagtaaaaaacaaacaaaaacaaaaaaacctgagaagtttgaattgtagttaaatgaccccaaactggcatttaacactgtttataaaaaatatatatatatatatatatatataatgaaaaaggtttcagagttgctaaagcttcagtttgtgacattaagtttatgaaattctaaaaaatgccttttttggagactatattatgctgaagaaggctgttcgtgaggaggagatgcgagcacccagaacgtcttttgaggctgggcgggtgtgattgtttactgcctactggatttttttctattaacattgaaaggtaaaatctgattatttagcatgagaaaaaaaaatccaactctgcttttggtcttgcttctataaatatatagtgtatacttggtgtagactttgcatatatacaaatttgtagtattttcttgttttgatgtctaatctgtatctataatgtaccctagtagtcgaacatacttttgattgtacaattgtacatttgtatacctgtaatgtaaatgtggagaagtttgaatcaacataaacacgttttttggtaagaaaagagaattagccagccctgtgcattcagtgtatattctcaccttttatggtcgtagcatatagtgttgtatattgtaaattgtaatttcaaccagaagtaaatttttttcttttgaaggaataaatgttctttatacagcctagttaatgtttaaaaagaaaaaaatagcttggttttatttgtcatctagtctcaagtatagcgagattctttctaaatgttattcaagattgagttctcactagtgtttttttaatcctaaaaaagtaatgttttgattttgtgacagtcaaaaggacgtgcaaaagtctagccttgcccgagctttccttacaatcagagcccctctcaccttgtaaagtgtgaatcgcccttcccttttgtacagaagatgaactgtattttgcattttgtctacttgtaagtgaatgtaacatactgtcaattttccttgtttgaatatagaattgtaacactacacggtgtacatttccagagccttgtgtatatttccaatgaacttttttgcaagcacacttgtaaccatatgtgtataattaacaaacctgtgtatgcttatgcctgggcaactattttttgtaactcttgtgtagattgtctctaaacaatgtgtgatctttattttgaaaaatacagaactttggaatctg

SEQ ID NO: 25 - DNA, 5069 bp, Homo sapiens
atgttgtcggagtgaaaggtaagggggagcgagagcgccagagagagaagatcggggggctgaaatccatcttcatcctaccgctccgcccgtgttggtggaatgagcgttgcatgtgtcttgaagagaaaagcagtgctttggcaggactctttcagcccccacctgaaacatcaccctcaagaaccagctaatcccaacatgcctgttgttttgacatctggaacagggtcgcaagcgcagccacaaccagctgcaaatcaggctcttgcagctgggactcactccagccctgtcccaggatctataggagttgcaggccgttcccaggacgacgctatggtggactacttctttcagaggcagcatggtgcgttccatggatgaactgaatcatgattttcaagcacttgctctggagggaagagcgatgggagagcagctcttgccaggtaaaaagttttgggaaacagatgaatccagcaaagatggaccaaaaggaatattcctgggtgatcaatggcgagacagtgcctggggaacatcagatcattcagtttcccagccaatcatggtgcagagaagacctggtcagagtttccatgtgaacagtgaggtcaattctgtactgtccccacgatcggagagtgggggactaggcgttagcatggtggagtatgtgttgagctcatccccgggcgattcctgtctaagaaaaggaggatttggcccaagggatgcagacagtgatgaaaacgacaaaggtgaaaagaagaacaagggtacgtttgatggagataagctaggagatttgaaggaggagggtgatgtgatggacaagaccaatggtttaccagtgcagaatgggattgatgcagacgtcaaagattttagccgtacccctggtaattgccagaactctgctaatgaagtggatcttctgggtccaaaccagaatggttctgagggcttagcccagctgaccagcaccaatggtgccaagcctgtggaggatttctccaacatggagtcccagagtgtccccttggaccccatggaacatgtgggcatggagcctcttcagtttgattattcaggcacgcaggtacctgtggactcagcagcagcaactgtgggactttttgactacaattctcaacaacagctgttccaaagacctaatgcgcttgctgtccagcagttgacagctgctcagcagcagcagtatgcactggcagctgctcatcagccgcacatcggtttagctcccgctgcgtttgtccccaatccatacatcatcagcgctgctcccccagggacggacccctacacagctggattggctgcagcagcgacactaggcccagctgtggtccctcaccagtattatggagttactccctggggagtctaccctgccagtcttttccagcagcaagctgccgctgccgctgcagcaactaattcagctaatcaacagaccaccccacaggctcagcaaggacagcagcaggttctccgtggaggagccagccaacgtcctttgaccccaaaccagaaccagcagggacagcaaacggatccccttgtggcagctgcagcagtgaattctgcccttgcatttggacaaggtctggcagcaggcatgccaggttatccggtgttggctcctgctgcttactatgaccaaactggtgcccttgtagtgaatgcaggcgcgagaaatggtcttggagctcctgttcgacttgtagctcctgccccagtcatcattagttcctcagctgcacaagcagctgttgcagcagccgcagcttcagcaaatggagcagctggtggtcttgctggaacaacaaatggaccatttcgccctttaggaacacagcagcctcagccccagccccagcagcagcccaataacaacctggcatccagttctttctacggcaacaactctctgaacagcaattcacagagcagctccctcttctcccagggctctgcccagcctgccaacacatccttgggattcggaagtagcagttctctcggcgccaccctgggatccgcccttggagggtttggaacagcagttgcaaactccaacactggcagtggctcccgccgtgactccctgactggcagcagtgacctttataagaggacatcgagcagcttgacccccattggacacagtttttataacggccttagcttttcctcctctcctggacccgtgggcatgcctctccctagtcagggaccaggacattcacagacaccacctccttccctctcttcacatggatcctcttcaagcttaaacctgggaggactcacgaatggcagtggaagatacatctctgctgctccaggcgctgaagccaagtaccgcagtgcaagcagcgcctccagcctcttcagcccgagcagcactcttttctcttcctctcgtttgcgatatggaatgtctgatgtcatgccttctggcaggagcaggcttttggaagattttcgaaacaaccggtaccccaatttacaactgcgggagattgctggacatataatggaattttcccaagaccagcatgggtccagattcattcagctgaaactggagcgtgccacaccagctgagcgccagcttgtcttcaatgaaatcctccaggctgcctaccaactcatggtggatgtgtttggtaattacgtcattcagaagttctttgaatttggcagtcttgaacagaagctggctttggcagaacggattcgaggccacgtcctgtcattggcactacagatgtatggctgccgtgttatccagaaagctcttgagtttattccttcagaccagcagaatgagatggttcgggaactagatggccatgtcttgaagtgtgtgaaagatcagaatggcaatcacgtggttcagaaatgcattgaatgtgtacagccccagtctttgcaatttatcatcgatgcgtttaagggacaggtatttgccttatccacacatccttatggctgccgagtgattcagagaatcctggagcactgtctccctgaccagacactccctattttagaggagcttcaccagcacacagagcagcttgtacaggatcaatatggaaattatgtaatccaacatgtactggagcacggtcgtcctgaggataaaagcaaaattgtagcagaaatccgaggcaatgtacttgtattgagtcagcacaaatttgcaagcaatgttgtggagaagtgtgttactcacgcctcacgtacggagcgcgctgtgctcatcgatgaggtgtgcaccatgaacgacggtccccacagtgccttatacaccatgatgaaggaccagtatgccaactacgtggtccagaagatgattgacgtggcggagccaggccagcggaagatcgtcatgcataagatccggccccacatcgcaactcttcgtaagtacacctatggcaagcacattctggccaagctggagaagtactacatgaagaacggtgttgacttagggcccatctgtggcccccctaatggtatcatctgaggcagtgtcacccgctgttccctcattcccgctgacctcactggcccactggcaaatccaaccagcaaccagaaatgttctagtgtagagtctgagacgggcaagtggttgctccaggattactccctcctccaaaaaaggaatcaaatccacgagtggaaaagcctttgtaaatttaattttattacacataacatgtactattttttttaattgactaattgccctgctgttttactggtgtataggatacttgtacataggtaaccaatgtacatgggaggccacatattttgttcactgttgtatctatatttcacatgtggaaactttcagggtggttggtttaacaaaaaaaaaaagctttaaaaaaaaaagaaaaaaaggaaaaggtttttagctcatttgcctggccggcaagttttgcaaatagctcttccccacctcctcattttagtaaaaaacaaacaaaaacaaaaaaacctgagaagtttgaattgtagttaaatgaccccaaactggcatttaacactgtttataaaaaatatatatatatatatatatatataatgaaaaaggtttcagagttgctaaagcttcagtttgtgacattaagtttatgaaattctaaaaaatgccttttttggagactatattatgctgaagaaggctgttcgtgaggaggagatgcgagcacccagaacgtcttttgaggctgggcgggtgtgattgtttactgcctactggatttttttctattaacattgaaaggtaaaatctgattatttagcatgagaaaaaaaaatccaactctgcttttggtcttgcttctataaatatatagtgtatacttggtgtagactttgcatatatacaaatttgtagtattttcttgttttgatgtctaatctgtatctataatgtaccctagtagtcgaacatacttttgattgtacaattgtacatttgtatacctgtaatgtaaatgtggagaagtttgaatcaacataaacacgttttttggtaagaaaagagaattagccagccctgtgcattcagtgtatattctcaccttttatggtcgtagcatatagtgttgtatattgtaaattgtaatttcaaccagaagtaaatttttttcttttgaaggaataaatgttctttatacagcctagttaatgtttaaaaagaaaaaaatagcttggttttatttgtcatctagtctcaagtatagcgagattctttctaaatgttattcaagattgagttctcactagtgtttttttaatcctaaaaaagtaatgttttgattttgtgacagtcaaaaggacgtgcaaaagtctagccttgcccgagctttccttacaatcagagcccctctcaccttgtaaaaaacctgtgtatgcttatgcctgggcaactattttttgtaactcttgtgtagattgtctctaaacaatgtgtgatctttattttgaaaaatacagaactttggaatctg

SEQ ID NO: 26 - DNA, 5436 bp, Homo sapiens
atgttgtcggagtgaaaggtaagggggagcgagagcgccagagagagaagatcggggggctgaaatccatcttcatcctaccgctccgcccgtgttggtggaatgagcgttgcatgtgtcttgaagagaaaagcagtgctttggcaggactctttcagcccccacctgaaacatcaccctcaagaaccagctaatcccaacatgcctgttgttttgacatctggaacagggtcgcaagcgcagccacaaccagctgcaaatcaggctcttgcagctgggactcactccagccctgtcccaggatctataggagttgcaggccgttcccaggacgacgctatggtggactacttctttcagaggcagcatggtgcgttccatggatgaactgaatcatgattttcaagcacttgctctggagggaagagcgatgggagagcagctcttgccaggtaaaaagttttgggaaacagatgaatccagcaaagatggaccaaaaggaatattcctgggtgatcaatggcgagacagtgcctggggaacatcagatcattcagtttcccagccaatcatggtgcagagaagacctggtcagagtttccatgtgaacagtgaggtcaattctgtactgtccccacgatcggagagtgggggactaggcgttagcatggtggagtatgtgttgagctcatccccgggcgattcctgtctaagaaaaggaggatttggcccaagggatgcagacagtgatgaaaacgacaaaggtgaaaagaagaacaagggtacgtttgatggagataagctaggagatttgaaggaggagggtgatgtgatggacaagaccaatggtttaccagtgcagaatgggattgatgcagacgtcaaagattttagccgtacccctggtaattgccagaactctgctaatgaagtggatcttctgggtccaaaccagaatggttctgagggcttagcccagctgaccagcaccaatggtgccaagcctgtggaggatttctccaacatggagtcccagagtgtccccttggaccccatggaacatgtgggcatggagcctcttcagtttgattattcaggcacgcaggtacctgtggactcagcagcagcaactgtgggactttttgactacaattctcaacaacagctgttccaaagacctaatgcgcttgctgtccagcagttgacagctgctcagcagcagcagtatgcactggcagctgctcatcagccgcacatcggtttagctcccgctgcgtttgtccccaatccatacatcatcagcgctgctcccccagggacggacccctacacagctggattggctgcagcagcgacactaggcccagctgtggtccctcaccagtattatggagttactccctggggagtctaccctgccagtcttttccagcagcaagctgccgctgccgctgcagcaactaattcagctaatcaacagaccaccccacaggctcagcaaggacagcagcaggttctccgtggaggagccagccaacgtcctttgaccccaaaccagaaccagcagggacagcaaacggatccccttgtggcagctgcagcagtgaattctgcccttgcatttggacaaggtctggcagcaggcatgccaggttatccggtgttggctcctgctgcttactatgaccaaactggtgcccttgtagtgaatgcaggcgcgagaaatggtcttggagctcctgttcgacttgtagctcctgccccagtcatcattagttcctcagctgcacaagcaggtgagcgcacatctgagtggactcctgccagagatctaaaagtggcgactgatagtgagattcttaaactgttgcagcagccgcagcttcagcaaatggagcagctggtggtcttgctggaacaacaaatggaccatttcgccctttaggaacacagcagcctcagccccagccccagcagcagcccaataacaacctggcatccagttctttctacggcaacaactctctgaacagcaattcacagagcagctccctcttctcccagggctctgcccagcctgccaacacatccttgggattcggaagtagcagttctctcggcgccaccctgggatccgcccttggagggtttggaacagcagttgcaaactccaacactggcagtggctcccgccgtgactccctgactggcagcagtgacctttataagaggacatcgagcagcttgacccccattggacacagtttttataacggccttagcttttcctcctctcctggacccgtgggcatgcctctccctagtcagggaccaggacattcacagacaccacctccttccctctcttcacatggatcctcttcaagcttaaacctgggaggactcacgaatggcagtggaagatacatctctgctgctccaggcgctgaagccaagtaccgcagtgcaagcagcgcctccagcctcttcagcccgagcagcactcttttctcttcctctcgtttgcgatatggaatgtctgatgtcatgccttctggcaggagcaggcttttggaagattttcgaaacaaccggtaccccaatttacaactgcgggagattgctggacatataatggaattttcccaagaccagcatgggtccagattcattcagctgaaactggagcgtgccacaccagctgagcgccagcttgtcttcaatgaaatcctccaggctgcctaccaactcatggtggatgtgtttggtaattacgtcattcagaagttctttgaatttggcagtcttgaacagaagctggctttggcagaacggattcgaggccacgtcctgtcattggcactacagatgtatggctgccgtgttatccagaaagctcttgagtttattccttcagaccagcagaatgagatggttcgggaactagatggccatgtcttgaagtgtgtgaaagatcagaatggcaatcacgtggttcagaaatgcattgaatgtgtacagccccagtctttgcaatttatcatcgatgcgtttaagggacaggtatttgccttatccacacatccttatggctgccgagtgattcagagaatcctggagcactgtctccctgaccagacactccctattttagaggagcttcaccagcacacagagcagcttgtacaggatcaatatggaaattatgtaatccaacatgtactggagcacggtcgtcctgaggataaaagcaaaattgtagcagaaatccgaggcaatgtacttgtattgagtcagcacaaatttgcaagcaatgttgtggagaagtgtgttactcacgcctcacgtacggagcgcgctgtgctcatcgatgaggtgtgcaccatgaacgacggtccccacagtgccttatacaccatgatgaaggaccagtatgccaactacgtggtccagaagatgattgacgtggcggagccaggccagcggaagatcgtcatgcataagatccggccccacatcgcaactcttcgtaagtacacctatggcaagcacattctggccaagctggagaagtactacatgaagaacggtgttgacttagggcccatctgtggcccccctaatggtatcatctgaggcagtgtcacccgctgttccctcattcccgctgacctcactggcccactggcaaatccaaccagcaaccagaaatgttctagtgtagagtctgagacgggcaagtggttgctccaggattactccctcctccaaaaaaggaatcaaatccacgagtggaaaagcctttgtaaatttaattttattacacataacatgtactattttttttaattgactaattgccctgctgttttactggtgtataggatacttgtacataggtaaccaatgtacatgggaggccacatattttgttcactgttgtatctatatttcacatgtggaaactttcagggtggttggtttaacaaaaaaaaaaagctttaaaaaaaaaagaaaaaaaggaaaaggtttttagctcatttgcctggccggcaagttttgcaaatagctcttccccacctcctcattttagtaaaaaacaaacaaaaacaaaaaaacctgagaagtttgaattgtagttaaatgaccccaaactggcatttaacactgtttataaaaaatatatatatatatatatatatataatgaaaaaggtttcagagttgctaaagcttcagtttgtgacattaagtttatgaaattctaaaaaatgccttttttggagactatattatgctgaagaaggctgttcgtgaggaggagatgcgagcacccagaacgtcttttgaggctgggcgggtgtgattgtttactgcctactggatttttttctattaacattgaaaggtaaaatctgattatttagcatgagaaaaaaaaatccaactctgcttttggtcttgcttctataaatatatagtgtatacttggtgtagactttgcatatatacaaatttgtagtattttcttgttttgatgtctaatctgtatctataatgtaccctagtagtcgaacatacttttgattgtacaattgtacatttgtatacctgtaatgtaaatgtggagaagtttgaatcaacataaacacgttttttggtaagaaaagagaattagccagccctgtgcattcagtgtatattctcaccttttatggtcgtagcatatagtgttgtatattgtaaattgtaatttcaaccagaagtaaatttttttcttttgaaggaataaatgttctttatacagcctagttaatgtttaaaaagaaaaaaatagcttggttttatttgtcatctagtctcaagtatagcgagattctttctaaatgttattcaagattgagttctcactagtgtttttttaatcctaaaaaagtaatgttttgattttgtgacagtcaaaaggacgtgcaaaagtctagccttgcccgagctttccttacaatcagagcccctctcaccttgtaaagtgtgaatcgcccttcccttttgtacagaagatgaactgtattttgcattttgtctacttgtaagtgaatgtaacatactgtcaattttccttgtttgaatatagaattgtaacactacacggtgtacatttccagagccttgtgtatatttccaatgaacttttttgcaagcacacttgtaaccatatgtgtataattaacaaacctgtgtatgcttatgcctgggcaactattttttgtaactcttgtgtagattgtctctaaacaatgtgtgatctttattttgaaaaatacagaactttggaatctgaaaaaaaaaaaaaaaaaaaaaaaamaamaaaaasaaaaaacaaaacaaaaacarrmaamaraaamaaacacaaaaraaarammaaaacacaacaaca

SEQ ID NO: 27 - DNA, 5339 bp, Homo sapiens
atgttgtcggagtgaaaggtaagggggagcgagagcgccagagagagaagatcggggggctgaaatccatcttcatcctaccgctccgcccgtgttggtggaatgagcgttgcatgtgtcttgaagagaaaagcagtgctttggcaggactctttcagcccccacctgaaacatcaccctcaagaaccagctaatcccaacatgcctgttgttttgacatctggaacagggtcgcaagcgcagccacaaccagctgcaaatcaggctcttgcagctgggactcactccagccctgtcccaggatctataggagttgcaggccgttcccaggacgacgctatggtggactacttctttcagaggcagcatggtgcgttccatggatgaactgaatcatgattttcaagcacttgctctggagggaagagcgatgggagagcagctcttgccaggtaaaaagttttgggaaacagatgaatccagcaaagatggaccaaaaggaatattcctgggtgatcaatggcgagacagtgcctggggaacatcagatcattcagtttcccagccaatcatggtgcagagaagacctggtcagagtttccatgtgaacagtgaggtcaattctgtactgtccccacgatcggagagtgggggactaggcgttagcatggtggagtatgtgttgagctcatccccgggcgattcctgtctaagaaaaggaggatttggcccaagggatgcagacagtgatgaaaacgacaaaggtgaaaagaagaacaagggtacgtttgatggagataagctaggagatttgaaggaggagggtgatgtgatggacaagaccaatggtttaccagtgcagaatgggattgatgcagacgtcaaagattttagccgtacccctggtaattgccagaactctgctaatgaagtggatcttctgggtccaaaccagaatggttctgagggcttagcccagctgaccagcaccaatggtgccaagcctgtggaggatttctccaacatggagtcccagagtgtccccttggaccccatggaacatgtgggcatggagcctcttcagtttgattattcaggcacgcaggtacctgtggactcagcagcagcaactgtgggactttttgactacaattctcaacaacagctgttccaaagacctaatgcgcttgctgtccagcagttgacagctgctcagcagcagcagtatgcactggcagctgctcatcagccgcacatcggtttagctcccgctgcgtttgtccccaatccatacatcatcagcgctgctcccccagggacggacccctacacagctggattggctgcagcagcgacactaggcccagctgtggtccctcaccagtattatggagttactccctggggagtctaccctgccagtcttttccagcagcaagctgccgctgccgctgcagcaactaattcagctaatcaacagaccaccccacaggctcagcaaggacagcagcaggttctccgtggaggagccagccaacgtcctttgaccccaaaccagaaccagcagggacagcaaacggatccccttgtggcagctgcagcagtgaattctgcccttgcatttggacaaggtctggcagcaggcatgccaggttatccggtgttggctcctgctgcttactatgaccaaactggtgcccttgtagtgaatgcaggcgcgagaaatggtcttggagctcctgttcgacttgtagctcctgccccagtcatcattagttcctcagctgcacaagcaggtgagcgcacatctgagtggactcctgccagagatctaaaagtggcgactgatagtgagattcttaaactgttgcagcagccgcagcttcagcaaatggagcagctggtggtcttgctggaacaacaaatggaccatttcgccctttaggaacacagcagcctcagccccagccccagcagcagcccaataacaacctggcatccagttctttctacggcaacaactctctgaacagcaattcacagagcagctccctcttctcccagggctctgcccagcctgccaacacatccttgggattcggaagtagcagttctctcggcgccaccctgggatccgcccttggagggtttggaacagcagttgcaaactccaacactggcagtggctcccgccgtgactccctgactggcagcagtgacctttataagaggacatcgagcagcttgacccccattggacacagtttttataacggccttagcttttcctcctctcctggacccgtgggcatgcctctccctagtcagggaccaggacattcacagacaccacctccttccctctcttcacatggatcctcttcaagcttaaacctgggaggactcacgaatggcagtggaagatacatctctgctgctccaggcgctgaagccaagtaccgcagtgcaagcagcgcctccagcctcttcagcccgagcagcactcttttctcttcctctcgtttgcgatatggaatgtctgatgtcatgccttctggcaggagcaggcttttggaagattttcgaaacaaccggtaccccaatttacaactgcgggagattgctggacatataatggaattttcccaagaccagcatgggtccagattcattcagctgaaactggagcgtgccacaccagctgagcgccagcttgtcttcaatgaaatcctccaggctgcctaccaactcatggtggatgtgtttggtaattacgtcattcagaagttctttgaatttggcagtcttgaacagaagctggctttggcagaacggattcgaggccacgtcctgtcattggcactacagatgtatggctgccgtgttatccagaaagctcttgagtttattccttcagaccagcagaatgagatggttcgggaactagatggccatgtcttgaagtgtgtgaaagatcagaatggcaatcacgtggttcagaaatgcattgaatgtgtacagccccagtctttgcaatttatcatcgatgcgtttaagggacaggtatttgccttatccacacatccttatggctgccgagtgattcagagaatcctggagcactgtctccctgaccagacactccctattttagaggagcttcaccagcacacagagcagcttgtacaggatcaatatggaaattatgtaatccaacatgtactggagcacggtcgtcctgaggataaaagcaaaattgtagcagaaatccgaggcaatgtacttgtattgagtcagcacaaatttgcaagcaatgttgtggagaagtgtgttactcacgcctcacgtacggagcgcgctgtgctcatcgatgaggtgtgcaccatgaacgacggtccccacagtgccttatacaccatgatgaaggaccagtatgccaactacgtggtccagaagatgattgacgtggcggagccaggccagcggaagatcgtcatgcataagatccggccccacatcgcaactcttcgtaagtacacctatggcaagcacattctggccaagctggagaagtactacatgaagaacggtgttgacttagggcccatctgtggcccccctaatggtatcatctgaggcagtgtcacccgctgttccctcattcccgctgacctcactggcccactggcaaatccaaccagcaaccagaaatgttctagtgtagagtctgagacgggcaagtggttgctccaggattactccctcctccaaaaaaggaatcaaatccacgagtggaaaagcctttgtaaatttaattttattacacataacatgtactattttttttaattgactaattgccctgctgttttactggtgtataggatacttgtacataggtaaccaatgtacatgggaggccacatattttgttcactgttgtatctatatttcacatgtggaaactttcagggtggttggtttaacaaaaaaaaaaagctttaaaaaaaaaagaaaaaaaggaaaaggtttttagctcatttgcctggccggcaagttttgcaaatagctcttccccacctcctcattttagtaaaaaacaaacaaaaacaaaaaaacctgagaagtttgaattgtagttaaatgaccccaaactggcatttaacactgtttataaaaaatatatatatatatatatatatataatgaaaaaggtttcagagttgctaaagcttcagtttgtgacattaagtttatgaaattctaaaaaatgccttttttggagactatattatgctgaagaaggctgttcgtgaggaggagatgcgagcacccagaacgtcttttgaggctgggcgggtgtgattgtttactgcctactggatttttttctattaacattgaaaggtaaaatctgattatttagcatgagaaaaaaaaatccaactctgcttttggtcttgcttctataaatatatagtgtatacttggtgtagactttgcatatatacaaatttgtagtattttcttgttttgatgtctaatctgtatctataatgtaccctagtagtcgaacatacttttgattgtacaattgtacatttgtatacctgtaatgtaaatgtggagaagtttgaatcaacataaacacgttttttggtaagaaaagagaattagccagccctgtgcattcagtgtatattctcaccttttatggtcgtagcatatagtgttgtatattgtaaattgtaatttcaaccagaagtaaatttttttcttttgaaggaataaatgttctttatacagcctagttaatgtttaaaaagaaaaaaatagcttggttttatttgtcatctagtctcaagtatagcgagattctttctaaatgttattcaagattgagttctcactagtgtttttttaatcctaaaaaagtaatgttttgattttgtgacagtcaaaaggacgtgcaaaagtctagccttgcccgagctttccttacaatcagagcccctctcaccttgtaaagtgtgaatcgcccttcccttttgtacagaagatgaactgtattttgcattttgtctacttgtaagtgaatgtaacatactgtcaattttccttgtttgaatatagaattgtaacactacacggtgtacatttccagagccttgtgtatatttccaatgaacttttttgcaagcacacttgtaaccatatgtgtataattaacaaacctgtgtatgcttatgcctgggcaactattttttgtaactcttgtgtagattgtctctaaacaatgtgtgatctttattttgaaaaatacagaactttggaatctg

SEQ ID NO: 28 - DNA, 5137 bp, Homo sapiens
atgttgtcggagtgaaaggtaagggggagcgagagcgccagagagagaagatcggggggctgaaatccatcttcatcctaccgctccgcccgtgttggtggaatgagcgttgcatgtgtcttgaagagaaaagcagtgctttggcaggactctttcagcccccacctgaaacatcaccctcaagaaccagctaatcccaacatgcctgttgttttgacatctggaacagggtcgcaagcgcagccacaaccagctgcaaatcaggctcttgcagctgggactcactccagccctgtcccaggatctataggagttgcaggccgttcccaggacgacgctatggtggactacttctttcagaggcagcatggtgcgttccatggatgaactgaatcatgattttcaagcacttgctctggagggaagagcgatgggagagcagctcttgccaggtaaaaagttttgggaaacagatgaatccagcaaagatggaccaaaaggaatattcctgggtgatcaatggcgagacagtgcctggggaacatcagatcattcagtttcccagccaatcatggtgcagagaagacctggtcagagtttccatgtgaacagtgaggtcaattctgtactgtccccacgatcggagagtgggggactaggcgttagcatggtggagtatgtgttgagctcatccccgggcgattcctgtctaagaaaaggaggatttggcccaagggatgcagacagtgatgaaaacgacaaaggtgaaaagaagaacaagggtacgtttgatggagataagctaggagatttgaaggaggagggtgatgtgatggacaagaccaatggtttaccagtgcagaatgggattgatgcagacgtcaaagattttagccgtacccctggtaattgccagaactctgctaatgaagtggatcttctgggtccaaaccagaatggttctgagggcttagcccagctgaccagcaccaatggtgccaagcctgtggaggatttctccaacatggagtcccagagtgtccccttggaccccatggaacatgtgggcatggagcctcttcagtttgattattcaggcacgcaggtacctgtggactcagcagcagcaactgtgggactttttgactacaattctcaacaacagctgttccaaagacctaatgcgcttgctgtccagcagttgacagctgctcagcagcagcagtatgcactggcagctgctcatcagccgcacatcggtttagctcccgctgcgtttgtccccaatccatacatcatcagcgctgctcccccagggacggacccctacacagctggattggctgcagcagcgacactaggcccagctgtggtccctcaccagtattatggagttactccctggggagtctaccctgccagtcttttccagcagcaagctgccgctgccgctgcagcaactaattcagctaatcaacagaccaccccacaggctcagcaaggacagcagcaggttctccgtggaggagccagccaacgtcctttgaccccaaaccagaaccagcagggacagcaaacggatccccttgtggcagctgcagcagtgaattctgcccttgcatttggacaaggtctggcagcaggcatgccaggttatccggtgttggctcctgctgcttactatgaccaaactggtgcccttgtagtgaatgcaggcgcgagaaatggtcttggagctcctgttcgacttgtagctcctgccccagtcatcattagttcctcagctgcacaagcaggtgagcgcacatctgagtggactcctgccagagatctaaaagtggcgactgatagtgagattcttaaactgttgcagcagccgcagcttcagcaaatggagcagctggtggtcttgctggaacaacaaatggaccatttcgccctttaggaacacagcagcctcagccccagccccagcagcagcccaataacaacctggcatccagttctttctacggcaacaactctctgaacagcaattcacagagcagctccctcttctcccagggctctgcccagcctgccaacacatccttgggattcggaagtagcagttctctcggcgccaccctgggatccgcccttggagggtttggaacagcagttgcaaactccaacactggcagtggctcccgccgtgactccctgactggcagcagtgacctttataagaggacatcgagcagcttgacccccattggacacagtttttataacggccttagcttttcctcctctcctggacccgtgggcatgcctctccctagtcagggaccaggacattcacagacaccacctccttccctctcttcacatggatcctcttcaagcttaaacctgggaggactcacgaatggcagtggaagatacatctctgctgctccaggcgctgaagccaagtaccgcagtgcaagcagcgcctccagcctcttcagcccgagcagcactcttttctcttcctctcgtttgcgatatggaatgtctgatgtcatgccttctggcaggagcaggcttttggaagattttcgaaacaaccggtaccccaatttacaactgcgggagattgctggacatataatggaattttcccaagaccagcatgggtccagattcattcagctgaaactggagcgtgccacaccagctgagcgccagcttgtcttcaatgaaatcctccaggctgcctaccaactcatggtggatgtgtttggtaattacgtcattcagaagttctttgaatttggcagtcttgaacagaagctggctttggcagaacggattcgaggccacgtcctgtcattggcactacagatgtatggctgccgtgttatccagaaagctcttgagtttattccttcagaccagcagaatgagatggttcgggaactagatggccatgtcttgaagtgtgtgaaagatcagaatggcaatcacgtggttcagaaatgcattgaatgtgtacagccccagtctttgcaatttatcatcgatgcgtttaagggacaggtatttgccttatccacacatccttatggctgccgagtgattcagagaatcctggagcactgtctccctgaccagacactccctattttagaggagcttcaccagcacacagagcagcttgtacaggatcaatatggaaattatgtaatccaacatgtactggagcacggtcgtcctgaggataaaagcaaaattgtagcagaaatccgaggcaatgtacttgtattgagtcagcacaaatttgcaagcaatgttgtggagaagtgtgttactcacgcctcacgtacggagcgcgctgtgctcatcgatgaggtgtgcaccatgaacgacggtccccacagtgccttatacaccatgatgaaggaccagtatgccaactacgtggtccagaagatgattgacgtggcggagccaggccagcggaagatcgtcatgcataagatccggccccacatcgcaactcttcgtaagtacacctatggcaagcacattctggccaagctggagaagtactacatgaagaacggtgttgacttagggcccatctgtggcccccctaatggtatcatctgaggcagtgtcacccgctgttccctcattcccgctgacctcactggcccactggcaaatccaaccagcaaccagaaatgttctagtgtagagtctgagacgggcaagtggttgctccaggattactccctcctccaaaaaaggaatcaaatccacgagtggaaaagcctttgtaaatttaattttattacacataacatgtactattttttttaattgactaattgccctgctgttttactggtgtataggatacttgtacataggtaaccaatgtacatgggaggccacatattttgttcactgttgtatctatatttcacatgtggaaactttcagggtggttggtttaacaaaaaaaaaaagctttaaaaaaaaaagaaaaaaaggaaaaggtttttagctcatttgcctggccggcaagttttgcaaatagctcttccccacctcctcattttagtaaaaaacaaacaaaaacaaaaaaacctgagaagtttgaattgtagttaaatgaccccaaactggcatttaacactgtttataaaaaatatatatatatatatatatatataatgaaaaaggtttcagagttgctaaagcttcagtttgtgacattaagtttatgaaattctaaaaaatgccttttttggagactatattatgctgaagaaggctgttcgtgaggaggagatgcgagcacccagaacgtcttttgaggctgggcgggtgtgattgtttactgcctactggatttttttctattaacattgaaaggtaaaatctgattatttagcatgagaaaaaaaaatccaactctgcttttggtcttgcttctataaatatatagtgtatacttggtgtagactttgcatatatacaaatttgtagtattttcttgttttgatgtctaatctgtatctataatgtaccctagtagtcgaacatacttttgattgtacaattgtacatttgtatacctgtaatgtaaatgtggagaagtttgaatcaacataaacacgttttttggtaagaaaagagaattagccagccctgtgcattcagtgtatattctcaccttttatggtcgtagcatatagtgttgtatattgtaaattgtaatttcaaccagaagtaaatttttttcttttgaaggaataaatgttctttatacagcctagttaatgtttaaaaagaaaaaaatagcttggttttatttgtcatctagtctcaagtatagcgagattctttctaaatgttattcaagattgagttctcactagtgtttttttaatcctaaaaaagtaatgttttgattttgtgacagtcaaaaggacgtgcaaaagtctagccttgcccgagctttccttacaatcagagcccctctcaccttgtaaaaaacctgtgtatgcttatgcctgggcaactattttttgtaactcttgtgtagattgtctctaaacaatgtgtgatctttattttgaaaaatacagaactttggaatctg

SEQ ID NO: 29 - DNA, 5287 bp, Homo sapiens
atgttgtcggagtgaaaggtaagggggagcgagagcgccagagagagaagatcggggggctgaaatccatcttcatcctaccgctccgcccgtgttggtggaatgagcgttgcatgtgtcttgaagagaaaagcagtgctttggcaggactctttcagcccccacctgaaacatcaccctcaagaaccagctaatcccaacatgcctgttgttttgacatctggaacagggtcgcaagcgcagccacaaccagctgcaaatcaggctcttgcagctgggactcactccagccctgtcccaggatctataggagttgcaggccgttcccaggacgacgctatggtggactacttctttcagaggcagcatggtgcgttccatggatgaactgaatcatgattttcaagcacttgctctggagggaagagcgatgggagagcagctcttgccaggtaaaaagttttgggaaacagatgaatccagcaaagatggaccaaaaggaatattcctgggtgatcaatggcgagacagtgcctggggaacatcagatcattcagtttcccagccaatcatggtgcagagaagacctggtcagagtttccatgtgaacagtgaggtcaattctgtactgtccccacgatcggagagtgggggactaggcgttagcatggtggagtatgtgttgagctcatccccgggcgattcctgtctaagaaaaggaggatttggcccaagggatgcagacagtgatgaaaacgacaaaggtgaaaagaagaacaagggtacgtttgatggagataagctaggagatttgaaggaggagggtgatgtgatggacaagaccaatggtttaccagtgcagaatgggattgatgcagacgtcaaagattttagccgtacccctggtaattgccagaactctgctaatgaagtggatcttctgggtccaaaccagaatggttctgagggcttagcccagctgaccagcaccaatggtgccaagcctgtggaggatttctccaacatggagtcccagagtgtccccttggaccccatggaacatgtgggcatggagcctcttcagtttgattattcaggcacgcaggtacctgtggactcagcagcagcaactgtgggactttttgactacaattctcaacaacagctgttccaaagacctaatgcgcttgctgtccagcagttgacagctgctcagcagcagcagtatgcactggcagctgctcatcagccgcacatcggtttagctcccgctgcgtttgtccccaatccatacatcatcagcgctgctcccccagggacggacccctacacagctggattggctgcagcagcgacactaggcccagctgtggtccctcaccagtattatggagttactccctggggagtctaccctgccagtcttttccagcagcaagctgccgctgccgctgcagcaactaattcagctaatcaacagaccaccccacaggctcagcaaggacagcagcaggttctccgtggaggagccagccaacgtcctttgaccccaaaccagaaccagcagggacagcaaacggatccccttgtggcagctgcagcagtgaattctgcccttgcatttggacaaggtctggcagcaggcatgccaggttatccggtgttggctcctgctgcttactatgaccaaactggtgcccttgtagtgaatgcaggcgcgagaaatggtcttggagctcctgttcgacttgtagctcctgccccagtcatcattagttcctcagctgcacaagcaggaacacagcagcctcagccccagccccagcagcagcccaataacaacctggcatccagttctttctacggcaacaactctctgaacagcaattcacagagcagctccctcttctcccagggctctgcccagcctgccaacacatccttgggattcggaagtagcagttctctcggcgccaccctgggatccgcccttggagggtttggaacagcagttgcaaactccaacactggcagtggctcccgccgtgactccctgactggcagcagtgacctttataagaggacatcgagcagcttgacccccattggacacagtttttataacggccttagcttttcctcctctcctggacccgtgggcatgcctctccctagtcagggaccaggacattcacagacaccacctccttccctctcttcacatggatcctcttcaagcttaaacctgggaggactcacgaatggcagtggaagatacatctctgctgctccaggcgctgaagccaagtaccgcagtgcaagcagcgcctccagcctcttcagcccgagcagcactcttttctcttcctctcgtttgcgatatggaatgtctgatgtcatgccttctggcaggagcaggcttttggaagattttcgaaacaaccggtaccccaatttacaactgcgggagattgctggacatataatggaattttcccaagaccagcatgggtccagattcattcagctgaaactggagcgtgccacaccagctgagcgccagcttgtcttcaatgaaatcctccaggctgcctaccaactcatggtggatgtgtttggtaattacgtcattcagaagttctttgaatttggcagtcttgaacagaagctggctttggcagaacggattcgaggccacgtcctgtcattggcactacagatgtatggctgccgtgttatccagaaagctcttgagtttattccttcagaccagcagaatgagatggttcgggaactagatggccatgtcttgaagtgtgtgaaagatcagaatggcaatcacgtggttcagaaatgcattgaatgtgtacagccccagtctttgcaatttatcatcgatgcgtttaagggacaggtatttgccttatccacacatccttatggctgccgagtgattcagagaatcctggagcactgtctccctgaccagacactccctattttagaggagcttcaccagcacacagagcagcttgtacaggatcaatatggaaattatgtaatccaacatgtactggagcacggtcgtcctgaggataaaagcaaaattgtagcagaaatccgaggcaatgtacttgtattgagtcagcacaaatttgcaagcaatgttgtggagaagtgtgttactcacgcctcacgtacggagcgcgctgtgctcatcgatgaggtgtgcaccatgaacgacggtccccacagtgccttatacaccatgatgaaggaccagtatgccaactacgtggtccagaagatgattgacgtggcggagccaggccagcggaagatcgtcatgcataagatccggccccacatcgcaactcttcgtaagtacacctatggcaagcacattctggccaagctggagaagtactacatgaagaacggtgttgacttagggcccatctgtggcccccctaatggtatcatctgaggcagtgtcacccgctgttccctcattcccgctgacctcactggcccactggcaaatccaaccagcaaccagaaatgttctagtgtagagtctgagacgggcaagtggttgctccaggattactccctcctccaaaaaaggaatcaaatccacgagtggaaaagcctttgtaaatttaattttattacacataacatgtactattttttttaattgactaattgccctgctgttttactggtgtataggatacttgtacataggtaaccaatgtacatgggaggccacatattttgttcactgttgtatctatatttcacatgtggaaactttcagggtggttggtttaacaaaaaaaaaaagctttaaaaaaaaaagaaaaaaaggaaaaggtttttagctcatttgcctggccggcaagttttgcaaatagctcttccccacctcctcattttagtaaaaaacaaacaaaaacaaaaaaacctgagaagtttgaattgtagttaaatgaccccaaactggcatttaacactgtttataaaaaatatatatatatatatatatatataatgaaaaaggtttcagagttgctaaagcttcagtttgtgacattaagtttatgaaattctaaaaaatgccttttttggagactatattatgctgaagaaggctgttcgtgaggaggagatgcgagcacccagaacgtcttttgaggctgggcgggtgtgattgtttactgcctactggatttttttctattaacattgaaaggtaaaatctgattatttagcatgagaaaaaaaaatccaactctgcttttggtcttgcttctataaatatatagtgtatacttggtgtagactttgcatatatacaaatttgtagtattttcttgttttgatgtctaatctgtatctataatgtaccctagtagtcgaacatacttttgattgtacaattgtacatttgtatacctgtaatgtaaatgtggagaagtttgaatcaacataaacacgttttttggtaagaaaagagaattagccagccctgtgcattcagtgtatattctcaccttttatggtcgtagcatatagtgttgtatattgtaaattgtaatttcaaccagaagtaaatttttttcttttgaaggaataaatgttctttatacagcctagttaatgtttaaaaagaaaaaaatagcttggttttatttgtcatctagtctcaagtatagcgagattctttctaaatgttattcaagattgagttctcactagtgtttttttaatcctaaaaaagtaatgttttgattttgtgacagtcaaaaggacgtgcaaaagtctagccttgcccgagctttccttacaatcagagcccctctcaccttgtaaagtgtgaatcgcccttcccttttgtacagaagatgaactgtattttgcattttgtctacttgtaagtgaatgtaacatactgtcaattttccttgtttgaatatagaattgtaacactacacggtgtacatttccagagccttgtgtatatttccaatgaacttttttgcaagcacacttgtaaccatatgtgtataattaacaaacctgtgtatgcttatgcctgggcaactattttttgtaactcttgtgtagattgtctctaaacaatgtgtgatctttattttgaaaaatacagaactttggaatctgaaaaaaaaaaaaaaaaaaaaaaaamaamaaaaasaaaaaacaaaacaaaaacarrmaamaraaamaaacacaaaaraaarammaaaacacaacaaca

SEQ ID NO: 30 - DNA, 5190 bp, Homo sapiens
atgttgtcggagtgaaaggtaagggggagcgagagcgccagagagagaagatcggggggctgaaatccatcttcatcctaccgctccgcccgtgttggtggaatgagcgttgcatgtgtcttgaagagaaaagcagtgctttggcaggactctttcagcccccacctgaaacatcaccctcaagaaccagctaatcccaacatgcctgttgttttgacatctggaacagggtcgcaagcgcagccacaaccagctgcaaatcaggctcttgcagctgggactcactccagccctgtcccaggatctataggagttgcaggccgttcccaggacgacgctatggtggactacttctttcagaggcagcatggtgcgttccatggatgaactgaatcatgattttcaagcacttgctctggagggaagagcgatgggagagcagctcttgccaggtaaaaagttttgggaaacagatgaatccagcaaagatggaccaaaaggaatattcctgggtgatcaatggcgagacagtgcctggggaacatcagatcattcagtttcccagccaatcatggtgcagagaagacctggtcagagtttccatgtgaacagtgaggtcaattctgtactgtccccacgatcggagagtgggggactaggcgttagcatggtggagtatgtgttgagctcatccccgggcgattcctgtctaagaaaaggaggatttggcccaagggatgcagacagtgatgaaaacgacaaaggtgaaaagaagaacaagggtacgtttgatggagataagctaggagatttgaaggaggagggtgatgtgatggacaagaccaatggtttaccagtgcagaatgggattgatgcagacgtcaaagattttagccgtacccctggtaattgccagaactctgctaatgaagtggatcttctgggtccaaaccagaatggttctgagggcttagcccagctgaccagcaccaatggtgccaagcctgtggaggatttctccaacatggagtcccagagtgtccccttggaccccatggaacatgtgggcatggagcctcttcagtttgattattcaggcacgcaggtacctgtggactcagcagcagcaactgtgggactttttgactacaattctcaacaacagctgttccaaagacctaatgcgcttgctgtccagcagttgacagctgctcagcagcagcagtatgcactggcagctgctcatcagccgcacatcggtttagctcccgctgcgtttgtccccaatccatacatcatcagcgctgctcccccagggacggacccctacacagctggattggctgcagcagcgacactaggcccagctgtggtccctcaccagtattatggagttactccctggggagtctaccctgccagtcttttccagcagcaagctgccgctgccgctgcagcaactaattcagctaatcaacagaccaccccacaggctcagcaaggacagcagcaggttctccgtggaggagccagccaacgtcctttgaccccaaaccagaaccagcagggacagcaaacggatccccttgtggcagctgcagcagtgaattctgcccttgcatttggacaaggtctggcagcaggcatgccaggttatccggtgttggctcctgctgcttactatgaccaaactggtgcccttgtagtgaatgcaggcgcgagaaatggtcttggagctcctgttcgacttgtagctcctgccccagtcatcattagttcctcagctgcacaagcaggaacacagcagcctcagccccagccccagcagcagcccaataacaacctggcatccagttctttctacggcaacaactctctgaacagcaattcacagagcagctccctcttctcccagggctctgcccagcctgccaacacatccttgggattcggaagtagcagttctctcggcgccaccctgggatccgcccttggagggtttggaacagcagttgcaaactccaacactggcagtggctcccgccgtgactccctgactggcagcagtgacctttataagaggacatcgagcagcttgacccccattggacacagtttttataacggccttagcttttcctcctctcctggacccgtgggcatgcctctccctagtcagggaccaggacattcacagacaccacctccttccctctcttcacatggatcctcttcaagcttaaacctgggaggactcacgaatggcagtggaagatacatctctgctgctccaggcgctgaagccaagtaccgcagtgcaagcagcgcctccagcctcttcagcccgagcagcactcttttctcttcctctcgtttgcgatatggaatgtctgatgtcatgccttctggcaggagcaggcttttggaagattttcgaaacaaccggtaccccaatttacaactgcgggagattgctggacatataatggaattttcccaagaccagcatgggtccagattcattcagctgaaactggagcgtgccacaccagctgagcgccagcttgtcttcaatgaaatcctccaggctgcctaccaactcatggtggatgtgtttggtaattacgtcattcagaagttctttgaatttggcagtcttgaacagaagctggctttggcagaacggattcgaggccacgtcctgtcattggcactacagatgtatggctgccgtgttatccagaaagctcttgagtttattccttcagaccagcagaatgagatggttcgggaactagatggccatgtcttgaagtgtgtgaaagatcagaatggcaatcacgtggttcagaaatgcattgaatgtgtacagccccagtctttgcaatttatcatcgatgcgtttaagggacaggtatttgccttatccacacatccttatggctgccgagtgattcagagaatcctggagcactgtctccctgaccagacactccctattttagaggagcttcaccagcacacagagcagcttgtacaggatcaatatggaaattatgtaatccaacatgtactggagcacggtcgtcctgaggataaaagcaaaattgtagcagaaatccgaggcaatgtacttgtattgagtcagcacaaatttgcaagcaatgttgtggagaagtgtgttactcacgcctcacgtacggagcgcgctgtgctcatcgatgaggtgtgcaccatgaacgacggtccccacagtgccttatacaccatgatgaaggaccagtatgccaactacgtggtccagaagatgattgacgtggcggagccaggccagcggaagatcgtcatgcataagatccggccccacatcgcaactcttcgtaagtacacctatggcaagcacattctggccaagctggagaagtactacatgaagaacggtgttgacttagggcccatctgtggcccccctaatggtatcatctgaggcagtgtcacccgctgttccctcattcccgctgacctcactggcccactggcaaatccaaccagcaaccagaaatgttctagtgtagagtctgagacgggcaagtggttgctccaggattactccctcctccaaaaaaggaatcaaatccacgagtggaaaagcctttgtaaatttaattttattacacataacatgtactattttttttaattgactaattgccctgctgttttactggtgtataggatacttgtacataggtaaccaatgtacatgggaggccacatattttgttcactgttgtatctatatttcacatgtggaaactttcagggtggttggtttaacaaaaaaaaaaagctttaaaaaaaaaagaaaaaaaggaaaaggtttttagctcatttgcctggccggcaagttttgcaaatagctcttccccacctcctcattttagtaaaaaacaaacaaaaacaaaaaaacctgagaagtttgaattgtagttaaatgaccccaaactggcatttaacactgtttataaaaaatatatatatatatatatatatataatgaaaaaggtttcagagttgctaaagcttcagtttgtgacattaagtttatgaaattctaaaaaatgccttttttggagactatattatgctgaagaaggctgttcgtgaggaggagatgcgagcacccagaacgtcttttgaggctgggcgggtgtgattgtttactgcctactggatttttttctattaacattgaaaggtaaaatctgattatttagcatgagaaaaaaaaatccaactctgcttttggtcttgcttctataaatatatagtgtatacttggtgtagactttgcatatatacaaatttgtagtattttcttgttttgatgtctaatctgtatctataatgtaccctagtagtcgaacatacttttgattgtacaattgtacatttgtatacctgtaatgtaaatgtggagaagtttgaatcaacataaacacgttttttggtaagaaaagagaattagccagccctgtgcattcagtgtatattctcaccttttatggtcgtagcatatagtgttgtatattgtaaattgtaatttcaaccagaagtaaatttttttcttttgaaggaataaatgttctttatacagcctagttaatgtttaaaaagaaaaaaatagcttggttttatttgtcatctagtctcaagtatagcgagattctttctaaatgttattcaagattgagttctcactagtgtttttttaatcctaaaaaagtaatgttttgattttgtgacagtcaaaaggacgtgcaaaagtctagccttgcccgagctttccttacaatcagagcccctctcaccttgtaaagtgtgaatcgcccttcccttttgtacagaagatgaactgtattttgcattttgtctacttgtaagtgaatgtaacatactgtcaattttccttgtttgaatatagaattgtaacactacacggtgtacatttccagagccttgtgtatatttccaatgaacttttttgcaagcacacttgtaaccatatgtgtataattaacaaacctgtgtatgcttatgcctgggcaactattttttgtaactcttgtgtagattgtctctaaacaatgtgtgatctttattttgaaaaatacagaactttggaatctg

SEQ ID NO: 31 - DNA, 5434 bp, Homo sapiens
atgttgtcggagtgaaaggtaagggggagcgagagcgccagagagagaagatcggggggctgaaatccatcttcatcctaccgctccgcccgtgttggtggaatgagcgttgcatgtgtcttgaagagaaaagcagtgctttggcaggactctttcagcccccacctgaaacatcaccctcaagaaccagctaatcccaacatgcctgttgttttgacatctggaacagggtcgcaagcgcagccacaaccagctgcaaatcaggctcttgcagctgggactcactccagccctgtcccaggatctataggagttgcaggccgttcccaggacgacgctatggtggactacttctttcagaggcagcatggtgagcagcttgggggaggaggaagtggaggaggcggctataataatagcaaacatcgatggcctactggggataacattcatgcagaacatcaggtgcgttccatggatgaactgaatcatgattttcaagcacttgctctggagggaagagcgatgggagagcagctcttgccaggtaaaaagttttgggaaacagatgaatccagcaaagatggaccaaaaggaatattcctgggtgatcaatggcgagacagtgcctggggaacatcagatcattcagtttcccagccaatcatggtgcagagaagacctggtcagagtttccatgtgaacagtgaggtcaattctgtactgtccccacgatcggagagtgggggactaggcgttagcatggtggagtatgtgttgagctcatccccgggcgattcctgtctaagaaaaggaggatttggcccaagggatgcagacagtgatgaaaacgacaaaggtgaaaagaagaacaagggtacgtttgatggagataagctaggagatttgaaggaggagggtgatgtgatggacaagaccaatggtttaccagtgcagaatgggattgatgcagacgtcaaagattttagccgtacccctggtaattgccagaactctgctaatgaagtggatcttctgggtccaaaccagaatggttctgagggcttagcccagctgaccagcaccaatggtgccaagcctgtggaggatttctccaacatggagtcccagagtgtccccttggaccccatggaacatgtgggcatggagcctcttcagtttgattattcaggcacgcaggtacctgtggactcagcagcagcaactgtgggactttttgactacaattctcaacaacagctgttccaaagacctaatgcgcttgctgtccagcagttgacagctgctcagcagcagcagtatgcactggcagctgctcatcagccgcacatcggtttagctcccgctgcgtttgtccccaatccatacatcatcagcgctgctcccccagggacggacccctacacagctggattggctgcagcagcgacactaggcccagctgtggtccctcaccagtattatggagttactccctggggagtctaccctgccagtcttttccagcagcaagctgccgctgccgctgcagcaactaattcagctaatcaacagaccaccccacaggctcagcaaggacagcagcaggttctccgtggaggagccagccaacgtcctttgaccccaaaccagaaccagcagggacagcaaacggatccccttgtggcagctgcagcagtgaattctgcccttgcatttggacaaggtctggcagcaggcatgccaggttatccggtgttggctcctgctgcttactatgaccaaactggtgcccttgtagtgaatgcaggcgcgagaaatggtcttggagctcctgttcgacttgtagctcctgccccagtcatcattagttcctcagctgcacaagcaggtgagcgcacatctgagtggactcctgccagagatctaaaagtggcgactgatagtgagattcttaaactgttgcagcagccgcagcttcagcaaatggagcagctggtggtcttgctggaacaacaaatggaccatttcgccctttaggaacacagcagcctcagccccagccccagcagcagcccaataacaacctggcatccagttctttctacggcaacaactctctgaacagcaattcacagagcagctccctcttctcccagggctctgcccagcctgccaacacatccttgggattcggaagtagcagttctctcggcgccaccctgggatccgcccttggagggtttggaacagcagttgcaaactccaacactggcagtggctcccgccgtgactccctgactggcagcagtgacctttataagaggacatcgagcagcttgacccccattggacacagtttttataacggccttagcttttcctcctctcctggacccgtgggcatgcctctccctagtcagggaccaggacattcacagacaccacctccttccctctcttcacatggatcctcttcaagcttaaacctgggaggactcacgaatggcagtggaagatacatctctgctgctccaggcgctgaagccaagtaccgcagtgcaagcagcgcctccagcctcttcagcccgagcagcactcttttctcttcctctcgtttgcgatatggaatgtctgatgtcatgccttctggcaggagcaggcttttggaagattttcgaaacaaccggtaccccaatttacaactgcgggagattgctggacatataatggaattttcccaagaccagcatgggtccagattcattcagctgaaactggagcgtgccacaccagctgagcgccagcttgtcttcaatgaaatcctccaggctgcctaccaactcatggtggatgtgtttggtaattacgtcattcagaagttctttgaatttggcagtcttgaacagaagctggctttggcagaacggattcgaggccacgtcctgtcattggcactacagatgtatggctgccgtgttatccagaaagctcttgagtttattccttcagaccagcagaatgagatggttcgggaactagatggccatgtcttgaagtgtgtgaaagatcagaatggcaatcacgtggttcagaaatgcattgaatgtgtacagccccagtctttgcaatttatcatcgatgcgtttaagggacaggtatttgccttatccacacatccttatggctgccgagtgattcagagaatcctggagcactgtctccctgaccagacactccctattttagaggagcttcaccagcacacagagcagcttgtacaggatcaatatggaaattatgtaatccaacatgtactggagcacggtcgtcctgaggataaaagcaaaattgtagcagaaatccgaggcaatgtacttgtattgagtcagcacaaatttgcaagcaatgttgtggagaagtgtgttactcacgcctcacgtacggagcgcgctgtgctcatcgatgaggtgtgcaccatgaacgacggtccccacagtgccttatacaccatgatgaaggaccagtatgccaactacgtggtccagaagatgattgacgtggcggagccaggccagcggaagatcgtcatgcataagatccggccccacatcgcaactcttcgtaagtacacctatggcaagcacattctggccaagctggagaagtactacatgaagaacggtgttgacttagggcccatctgtggcccccctaatggtatcatctgaggcagtgtcacccgctgttccctcattcccgctgacctcactggcccactggcaaatccaaccagcaaccagaaatgttctagtgtagagtctgagacgggcaagtggttgctccaggattactccctcctccaaaaaaggaatcaaatccacgagtggaaaagcctttgtaaatttaattttattacacataacatgtactattttttttaattgactaattgccctgctgttttactggtgtataggatacttgtacataggtaaccaatgtacatgggaggccacatattttgttcactgttgtatctatatttcacatgtggaaactttcagggtggttggtttaacaaaaaaaaaaagctttaaaaaaaaaagaaaaaaaggaaaaggtttttagctcatttgcctggccggcaagttttgcaaatagctcttccccacctcctcattttagtaaaaaacaaacaaaaacaaaaaaacctgagaagtttgaattgtagttaaatgaccccaaactggcatttaacactgtttataaaaaatatatatatatatatatatatataatgaaaaaggtttcagagttgctaaagcttcagtttgtgacattaagtttatgaaattctaaaaaatgccttttttggagactatattatgctgaagaaggctgttcgtgaggaggagatgcgagcacccagaacgtcttttgaggctgggcgggtgtgattgtttactgcctactggatttttttctattaacattgaaaggtaaaatctgattatttagcatgagaaaaaaaaatccaactctgcttttggtcttgcttctataaatatatagtgtatacttggtgtagactttgcatatatacaaatttgtagtattttcttgttttgatgtctaatctgtatctataatgtaccctagtagtcgaacatacttttgattgtacaattgtacatttgtatacctgtaatgtaaatgtggagaagtttgaatcaacataaacacgttttttggtaagaaaagagaattagccagccctgtgcattcagtgtatattctcaccttttatggtcgtagcatatagtgttgtatattgtaaattgtaatttcaaccagaagtaaatttttttcttttgaaggaataaatgttctttatacagcctagttaatgtttaaaaagaaaaaaatagcttggttttatttgtcatctagtctcaagtatagcgagattctttctaaatgttattcaagattgagttctcactagtgtttttttaatcctaaaaaagtaatgttttgattttgtgacagtcaaaaggacgtgcaaaagtctagccttgcccgagctttccttacaatcagagcccctctcaccttgtaaagtgtgaatcgcccttcccttttgtacagaagatgaactgtattttgcattttgtctacttgtaagtgaatgtaacatactgtcaattttccttgtttgaatatagaattgtaacactacacggtgtacatttccagagccttgtgtatatttccaatgaacttttttgcaagcacacttgtaaccatatgtgtataattaacaaacctgtgtatgcttatgcctgggcaactattttttgtaactcttgtgtagattgtctctaaacaatgtgtgatctttattttgaaaaatacagaactttggaatctg

SEQ ID NO: 32 - DNA, 5232 bp, Homo sapiens
atgttgtcggagtgaaaggtaagggggagcgagagcgccagagagagaagatcggggggctgaaatccatcttcatcctaccgctccgcccgtgttggtggaatgagcgttgcatgtgtcttgaagagaaaagcagtgctttggcaggactctttcagcccccacctgaaacatcaccctcaagaaccagctaatcccaacatgcctgttgttttgacatctggaacagggtcgcaagcgcagccacaaccagctgcaaatcaggctcttgcagctgggactcactccagccctgtcccaggatctataggagttgcaggccgttcccaggacgacgctatggtggactacttctttcagaggcagcatggtgagcagcttgggggaggaggaagtggaggaggcggctataataatagcaaacatcgatggcctactggggataacattcatgcagaacatcaggtgcgttccatggatgaactgaatcatgattttcaagcacttgctctggagggaagagcgatgggagagcagctcttgccaggtaaaaagttttgggaaacagatgaatccagcaaagatggaccaaaaggaatattcctgggtgatcaatggcgagacagtgcctggggaacatcagatcattcagtttcccagccaatcatggtgcagagaagacctggtcagagtttccatgtgaacagtgaggtcaattctgtactgtccccacgatcggagagtgggggactaggcgttagcatggtggagtatgtgttgagctcatccccgggcgattcctgtctaagaaaaggaggatttggcccaagggatgcagacagtgatgaaaacgacaaaggtgaaaagaagaacaagggtacgtttgatggagataagctaggagatttgaaggaggagggtgatgtgatggacaagaccaatggtttaccagtgcagaatgggattgatgcagacgtcaaagattttagccgtacccctggtaattgccagaactctgctaatgaagtggatcttctgggtccaaaccagaatggttctgagggcttagcccagctgaccagcaccaatggtgccaagcctgtggaggatttctccaacatggagtcccagagtgtccccttggaccccatggaacatgtgggcatggagcctcttcagtttgattattcaggcacgcaggtacctgtggactcagcagcagcaactgtgggactttttgactacaattctcaacaacagctgttccaaagacctaatgcgcttgctgtccagcagttgacagctgctcagcagcagcagtatgcactggcagctgctcatcagccgcacatcggtttagctcccgctgcgtttgtccccaatccatacatcatcagcgctgctcccccagggacggacccctacacagctggattggctgcagcagcgacactaggcccagctgtggtccctcaccagtattatggagttactccctggggagtctaccctgccagtcttttccagcagcaagctgccgctgccgctgcagcaactaattcagctaatcaacagaccaccccacaggctcagcaaggacagcagcaggttctccgtggaggagccagccaacgtcctttgaccccaaaccagaaccagcagggacagcaaacggatccccttgtggcagctgcagcagtgaattctgcccttgcatttggacaaggtctggcagcaggcatgccaggttatccggtgttggctcctgctgcttactatgaccaaactggtgcccttgtagtgaatgcaggcgcgagaaatggtcttggagctcctgttcgacttgtagctcctgccccagtcatcattagttcctcagctgcacaagcaggtgagcgcacatctgagtggactcctgccagagatctaaaagtggcgactgatagtgagattcttaaactgttgcagcagccgcagcttcagcaaatggagcagctggtggtcttgctggaacaacaaatggaccatttcgccctttaggaacacagcagcctcagccccagccccagcagcagcccaataacaacctggcatccagttctttctacggcaacaactctctgaacagcaattcacagagcagctccctcttctcccagggctctgcccagcctgccaacacatccttgggattcggaagtagcagttctctcggcgccaccctgggatccgcccttggagggtttggaacagcagttgcaaactccaacactggcagtggctcccgccgtgactccctgactggcagcagtgacctttataagaggacatcgagcagcttgacccccattggacacagtttttataacggccttagcttttcctcctctcctggacccgtgggcatgcctctccctagtcagggaccaggacattcacagacaccacctccttccctctcttcacatggatcctcttcaagcttaaacctgggaggactcacgaatggcagtggaagatacatctctgctgctccaggcgctgaagccaagtaccgcagtgcaagcagcgcctccagcctcttcagcccgagcagcactcttttctcttcctctcgtttgcgatatggaatgtctgatgtcatgccttctggcaggagcaggcttttggaagattttcgaaacaaccggtaccccaatttacaactgcgggagattgctggacatataatggaattttcccaagaccagcatgggtccagattcattcagctgaaactggagcgtgccacaccagctgagcgccagcttgtcttcaatgaaatcctccaggctgcctaccaactcatggtggatgtgtttggtaattacgtcattcagaagttctttgaatttggcagtcttgaacagaagctggctttggcagaacggattcgaggccacgtcctgtcattggcactacagatgtatggctgccgtgttatccagaaagctcttgagtttattccttcagaccagcagaatgagatggttcgggaactagatggccatgtcttgaagtgtgtgaaagatcagaatggcaatcacgtggttcagaaatgcattgaatgtgtacagccccagtctttgcaatttatcatcgatgcgtttaagggacaggtatttgccttatccacacatccttatggctgccgagtgattcagagaatcctggagcactgtctccctgaccagacactccctattttagaggagcttcaccagcacacagagcagcttgtacaggatcaatatggaaattatgtaatccaacatgtactggagcacggtcgtcctgaggataaaagcaaaattgtagcagaaatccgaggcaatgtacttgtattgagtcagcacaaatttgcaagcaatgttgtggagaagtgtgttactcacgcctcacgtacggagcgcgctgtgctcatcgatgaggtgtgcaccatgaacgacggtccccacagtgccttatacaccatgatgaaggaccagtatgccaactacgtggtccagaagatgattgacgtggcggagccaggccagcggaagatcgtcatgcataagatccggccccacatcgcaactcttcgtaagtacacctatggcaagcacattctggccaagctggagaagtactacatgaagaacggtgttgacttagggcccatctgtggcccccctaatggtatcatctgaggcagtgtcacccgctgttccctcattcccgctgacctcactggcccactggcaaatccaaccagcaaccagaaatgttctagtgtagagtctgagacgggcaagtggttgctccaggattactccctcctccaaaaaaggaatcaaatccacgagtggaaaagcctttgtaaatttaattttattacacataacatgtactattttttttaattgactaattgccctgctgttttactggtgtataggatacttgtacataggtaaccaatgtacatgggaggccacatattttgttcactgttgtatctatatttcacatgtggaaactttcagggtggttggtttaacaaaaaaaaaaagctttaaaaaaaaaagaaaaaaaggaaaaggtttttagctcatttgcctggccggcaagttttgcaaatagctcttccccacctcctcattttagtaaaaaacaaacaaaaacaaaaaaacctgagaagtttgaattgtagttaaatgaccccaaactggcatttaacactgtttataaaaaatatatatatatatatatatatataatgaaaaaggtttcagagttgctaaagcttcagtttgtgacattaagtttatgaaattctaaaaaatgccttttttggagactatattatgctgaagaaggctgttcgtgaggaggagatgcgagcacccagaacgtcttttgaggctgggcgggtgtgattgtttactgcctactggatttttttctattaacattgaaaggtaaaatctgattatttagcatgagaaaaaaaaatccaactctgcttttggtcttgcttctataaatatatagtgtatacttggtgtagactttgcatatatacaaatttgtagtattttcttgttttgatgtctaatctgtatctataatgtaccctagtagtcgaacatacttttgattgtacaattgtacatttgtatacctgtaatgtaaatgtggagaagtttgaatcaacataaacacgttttttggtaagaaaagagaattagccagccctgtgcattcagtgtatattctcaccttttatggtcgtagcatatagtgttgtatattgtaaattgtaatttcaaccagaagtaaatttttttcttttgaaggaataaatgttctttatacagcctagttaatgtttaaaaagaaaaaaatagcttggttttatttgtcatctagtctcaagtatagcgagattctttctaaatgttattcaagattgagttctcactagtgtttttttaatcctaaaaaagtaatgttttgattttgtgacagtcaaaaggacgtgcaaaagtctagccttgcccgagctttccttacaatcagagcccctctcaccttgtaaaaaacctgtgtatgcttatgcctgggcaactattttttgtaactcttgtgtagattgtctctaaacaatgtgtgatctttattttgaaaaatacagaactttggaatctg

SEQ ID NO: 33 - DNA, 5008 bp, Homo sapiens
atgttgtcggagtgaaaggtaagggggagcgagagcgccagagagagaagatcggggggctgaaatccatcttcatcctaccgctccgcccgtgttggtggaatgagcgttgcatgtgtcttgaagagaaaagcagtgctttggcaggactctttcagcccccacctgaaacatcaccctcaagaaccagctaatcccaacatgcctgttgttttgacatctggaacagggtcgcaagcgcagccacaaccagctgcaaatcaggctcttgcagctgggactcactccagccctgtcccaggatctataggagttgcaggccgttcccaggacgacgctatggtggactacttctttcagaggcagcatggtgagcagcttgggggaggaggaagtggaggaggcggctataataatagcaaacatcgatggcctactggggataacattcatgcagaacatcaggtgcgttccatggatgaactgaatcatgattttcaagcacttgctctggagggaagagcgatgggagagccgtacccctggtaattgccagaactctgctaatgaagtggatcttctgggtccaaaccagaatggttctgagggcttagcccagctgaccagcaccaatggtgccaagcctgtggaggatttctccaacatggagtcccagagtgtccccttggaccccatggaacatgtgggcatggagcctcttcagtttgattattcaggcacgcaggtacctgtggactcagcagcagcaactgtgggactttttgactacaattctcaacaacagctgttccaaagacctaatgcgcttgctgtccagcagttgacagctgctcagcagcagcagtatgcactggcagctgctcatcagccgcacatcggtttagctcccgctgcgtttgtccccaatccatacatcatcagcgctgctcccccagggacggacccctacacagctggattggctgcagcagcgacactaggcccagctgtggtccctcaccagtattatggagttactccctggggagtctaccctgccagtcttttccagcagcaagctgccgctgccgctgcagcaactaattcagctaatcaacagaccaccccacaggctcagcaaggacagcagcaggttctccgtggaggagccagccaacgtcctttgaccccaaaccagaaccagcagggacagcaaacggatccccttgtggcagctgcagcagtgaattctgcccttgcatttggacaaggtctggcagcaggcatgccaggttatccggtgttggctcctgctgcttactatgaccaaactggtgcccttgtagtgaatgcaggcgcgagaaatggtcttggagctcctgttcgacttgtagctcctgccccagtcatcattagttcctcagctgcacaagcagctgttgcagcagccgcagcttcagcaaatggagcagctggtggtcttgctggaacaacaaatggaccatttcgccctttaggaacacagcagcctcagccccagccccagcagcagcccaataacaacctggcatccagttctttctacggcaacaactctctgaacagcaattcacagagcagctccctcttctcccagggctctgcccagcctgccaacacatccttgggattcggaagtagcagttctctcggcgccaccctgggatccgcccttggagggtttggaacagcagttgcaaactccaacactggcagtggctcccgccgtgactccctgactggcagcagtgacctttataagaggacatcgagcagcttgacccccattggacacagtttttataacggccttagcttttcctcctctcctggacccgtgggcatgcctctccctagtcagggaccaggacattcacagacaccacctccttccctctcttcacatggatcctcttcaagcttaaacctgggaggactcacgaatggcagtggaagatacatctctgctgctccaggcgctgaagccaagtaccgcagtgcaagcagcgcctccagcctcttcagcccgagcagcactcttttctcttcctctcgtttgcgatatggaatgtctgatgtcatgccttctggcaggagcaggcttttggaagattttcgaaacaaccggtaccccaatttacaactgcgggagattgctggacatataatggaattttcccaagaccagcatgggtccagattcattcagctgaaactggagcgtgccacaccagctgagcgccagcttgtcttcaatgaaatcctccaggctgcctaccaactcatggtggatgtgtttggtaattacgtcattcagaagttctttgaatttggcagtcttgaacagaagctggctttggcagaacggattcgaggccacgtcctgtcattggcactacagatgtatggctgccgtgttatccagaaagctcttgagtttattccttcagaccagcagaatgagatggttcgggaactagatggccatgtcttgaagtgtgtgaaagatcagaatggcaatcacgtggttcagaaatgcattgaatgtgtacagccccagtctttgcaatttatcatcgatgcgtttaagggacaggtatttgccttatccacacatccttatggctgccgagtgattcagagaatcctggagcactgtctccctgaccagacactccctattttagaggagcttcaccagcacacagagcagcttgtacaggatcaatatggaaattatgtaatccaacatgtactggagcacggtcgtcctgaggataaaagcaaaattgtagcagaaatccgaggcaatgtacttgtattgagtcagcacaaatttgcaagcaatgttgtggagaagtgtgttactcacgcctcacgtacggagcgcgctgtgctcatcgatgaggtgtgcaccatgaacgacggtccccacagtgccttatacaccatgatgaaggaccagtatgccaactacgtggtccagaagatgattgacgtggcggagccaggccagcggaagatcgtcatgcataagatccggccccacatcgcaactcttcgtaagtacacctatggcaagcacattctggccaagctggagaagtactacatgaagaacggtgttgacttagggcccatctgtggcccccctaatggtatcatctgaggcagtgtcacccgctgttccctcattcccgctgacctcactggcccactggcaaatccaaccagcaaccagaaatgttctagtgtagagtctgagacgggcaagtggttgctccaggattactccctcctccaaaaaaggaatcaaatccacgagtggaaaagcctttgtaaatttaattttattacacataacatgtactattttttttaattgactaattgccctgctgttttactggtgtataggatacttgtacataggtaaccaatgtacatgggaggccacatattttgttcactgttgtatctatatttcacatgtggaaactttcagggtggttggtttaacaaaaaaaaaaagctttaaaaaaaaaagaaaaaaaggaaaaggtttttagctcatttgcctggccggcaagttttgcaaatagctcttccccacctcctcattttagtaaaaaacaaacaaaaacaaaaaaacctgagaagtttgaattgtagttaaatgaccccaaactggcatttaacactgtttataaaaaatatatatatatatatatatatataatgaaaaaggtttcagagttgctaaagcttcagtttgtgacattaagtttatgaaattctaaaaaatgccttttttggagactatattatgctgaagaaggctgttcgtgaggaggagatgcgagcacccagaacgtcttttgaggctgggcgggtgtgattgtttactgcctactggatttttttctattaacattgaaaggtaaaatctgattatttagcatgagaaaaaaaaatccaactctgcttttggtcttgcttctataaatatatagtgtatacttggtgtagactttgcatatatacaaatttgtagtattttcttgttttgatgtctaatctgtatctataatgtaccctagtagtcgaacatacttttgattgtacaattgtacatttgtatacctgtaatgtaaatgtggagaagtttgaatcaacataaacacgttttttggtaagaaaagagaattagccagccctgtgcattcagtgtatattctcaccttttatggtcgtagcatatagtgttgtatattgtaaattgtaatttcaaccagaagtaaatttttttcttttgaaggaataaatgttctttatacagcctagttaatgtttaaaaagaaaaaaatagcttggttttatttgtcatctagtctcaagtatagcgagattctttctaaatgttattcaagattgagttctcactagtgtttttttaatcctaaaaaagtaatgttttgattttgtgacagtcaaaaggacgtgcaaaagtctagccttgcccgagctttccttacaatcagagcccctctcaccttgtaaagtgtgaatcgcccttcccttttgtacagaagatgaactgtattttgcattttgtctacttgtaagtgaatgtaacatactgtcaattttccttgtttgaatatagaattgtaacactacacggtgtacatttccagagccttgtgtatatttccaatgaacttttttgcaagcacacttgtaaccatatgtgtataattaacaaacctgtgtatgcttatgcctgggcaactattttttgtaactcttgtgtagattgtctctaaacaatgtgtgatctttattttgaaaaatacagaactttggaatctgaaaaaaaaaaaaaaaaaaaaaaaamaamaaaaasaaaaaacaaaacaaaaacarrmaamaraaamaaacacaaaaraaarammaaaacacaacaaca

SEQ ID NO: 34 - DNA, 4911 bp, Homo sapiens
atgttgtcggagtgaaaggtaagggggagcgagagcgccagagagagaagatcggggggctgaaatccatcttcatcctaccgctccgcccgtgttggtggaatgagcgttgcatgtgtcttgaagagaaaagcagtgctttggcaggactctttcagcccccacctgaaacatcaccctcaagaaccagctaatcccaacatgcctgttgttttgacatctggaacagggtcgcaagcgcagccacaaccagctgcaaatcaggctcttgcagctgggactcactccagccctgtcccaggatctataggagttgcaggccgttcccaggacgacgctatggtggactacttctttcagaggcagcatggtgagcagcttgggggaggaggaagtggaggaggcggctataataatagcaaacatcgatggcctactggggataacattcatgcagaacatcaggtgcgttccatggatgaactgaatcatgattttcaagcacttgctctggagggaagagcgatgggagagccgtacccctggtaattgccagaactctgctaatgaagtggatcttctgggtccaaaccagaatggttctgagggcttagcccagctgaccagcaccaatggtgccaagcctgtggaggatttctccaacatggagtcccagagtgtccccttggaccccatggaacatgtgggcatggagcctcttcagtttgattattcaggcacgcaggtacctgtggactcagcagcagcaactgtgggactttttgactacaattctcaacaacagctgttccaaagacctaatgcgcttgctgtccagcagttgacagctgctcagcagcagcagtatgcactggcagctgctcatcagccgcacatcggtttagctcccgctgcgtttgtccccaatccatacatcatcagcgctgctcccccagggacggacccctacacagctggattggctgcagcagcgacactaggcccagctgtggtccctcaccagtattatggagttactccctggggagtctaccctgccagtcttttccagcagcaagctgccgctgccgctgcagcaactaattcagctaatcaacagaccaccccacaggctcagcaaggacagcagcaggttctccgtggaggagccagccaacgtcctttgaccccaaaccagaaccagcagggacagcaaacggatccccttgtggcagctgcagcagtgaattctgcccttgcatttggacaaggtctggcagcaggcatgccaggttatccggtgttggctcctgctgcttactatgaccaaactggtgcccttgtagtgaatgcaggcgcgagaaatggtcttggagctcctgttcgacttgtagctcctgccccagtcatcattagttcctcagctgcacaagcagctgttgcagcagccgcagcttcagcaaatggagcagctggtggtcttgctggaacaacaaatggaccatttcgccctttaggaacacagcagcctcagccccagccccagcagcagcccaataacaacctggcatccagttctttctacggcaacaactctctgaacagcaattcacagagcagctccctcttctcccagggctctgcccagcctgccaacacatccttgggattcggaagtagcagttctctcggcgccaccctgggatccgcccttggagggtttggaacagcagttgcaaactccaacactggcagtggctcccgccgtgactccctgactggcagcagtgacctttataagaggacatcgagcagcttgacccccattggacacagtttttataacggccttagcttttcctcctctcctggacccgtgggcatgcctctccctagtcagggaccaggacattcacagacaccacctccttccctctcttcacatggatcctcttcaagcttaaacctgggaggactcacgaatggcagtggaagatacatctctgctgctccaggcgctgaagccaagtaccgcagtgcaagcagcgcctccagcctcttcagcccgagcagcactcttttctcttcctctcgtttgcgatatggaatgtctgatgtcatgccttctggcaggagcaggcttttggaagattttcgaaacaaccggtaccccaatttacaactgcgggagattgctggacatataatggaattttcccaagaccagcatgggtccagattcattcagctgaaactggagcgtgccacaccagctgagcgccagcttgtcttcaatgaaatcctccaggctgcctaccaactcatggtggatgtgtttggtaattacgtcattcagaagttctttgaatttggcagtcttgaacagaagctggctttggcagaacggattcgaggccacgtcctgtcattggcactacagatgtatggctgccgtgttatccagaaagctcttgagtttattccttcagaccagcagaatgagatggttcgggaactagatggccatgtcttgaagtgtgtgaaagatcagaatggcaatcacgtggttcagaaatgcattgaatgtgtacagccccagtctttgcaatttatcatcgatgcgtttaagggacaggtatttgccttatccacacatccttatggctgccgagtgattcagagaatcctggagcactgtctccctgaccagacactccctattttagaggagcttcaccagcacacagagcagcttgtacaggatcaatatggaaattatgtaatccaacatgtactggagcacggtcgtcctgaggataaaagcaaaattgtagcagaaatccgaggcaatgtacttgtattgagtcagcacaaatttgcaagcaatgttgtggagaagtgtgttactcacgcctcacgtacggagcgcgctgtgctcatcgatgaggtgtgcaccatgaacgacggtccccacagtgccttatacaccatgatgaaggaccagtatgccaactacgtggtccagaagatgattgacgtggcggagccaggccagcggaagatcgtcatgcataagatccggccccacatcgcaactcttcgtaagtacacctatggcaagcacattctggccaagctggagaagtactacatgaagaacggtgttgacttagggcccatctgtggcccccctaatggtatcatctgaggcagtgtcacccgctgttccctcattcccgctgacctcactggcccactggcaaatccaaccagcaaccagaaatgttctagtgtagagtctgagacgggcaagtggttgctccaggattactccctcctccaaaaaaggaatcaaatccacgagtggaaaagcctttgtaaatttaattttattacacataacatgtactattttttttaattgactaattgccctgctgttttactggtgtataggatacttgtacataggtaaccaatgtacatgggaggccacatattttgttcactgttgtatctatatttcacatgtggaaactttcagggtggttggtttaacaaaaaaaaaaagctttaaaaaaaaaagaaaaaaaggaaaaggtttttagctcatttgcctggccggcaagttttgcaaatagctcttccccacctcctcattttagtaaaaaacaaacaaaaacaaaaaaacctgagaagtttgaattgtagttaaatgaccccaaactggcatttaacactgtttataaaaaatatatatatatatatatatatataatgaaaaaggtttcagagttgctaaagcttcagtttgtgacattaagtttatgaaattctaaaaaatgccttttttggagactatattatgctgaagaaggctgttcgtgaggaggagatgcgagcacccagaacgtcttttgaggctgggcgggtgtgattgtttactgcctactggatttttttctattaacattgaaaggtaaaatctgattatttagcatgagaaaaaaaaatccaactctgcttttggtcttgcttctataaatatatagtgtatacttggtgtagactttgcatatatacaaatttgtagtattttcttgttttgatgtctaatctgtatctataatgtaccctagtagtcgaacatacttttgattgtacaattgtacatttgtatacctgtaatgtaaatgtggagaagtttgaatcaacataaacacgttttttggtaagaaaagagaattagccagccctgtgcattcagtgtatattctcaccttttatggtcgtagcatatagtgttgtatattgtaaattgtaatttcaaccagaagtaaatttttttcttttgaaggaataaatgttctttatacagcctagttaatgtttaaaaagaaaaaaatagcttggttttatttgtcatctagtctcaagtatagcgagattctttctaaatgttattcaagattgagttctcactagtgtttttttaatcctaaaaaagtaatgttttgattttgtgacagtcaaaaggacgtgcaaaagtctagccttgcccgagctttccttacaatcagagcccctctcaccttgtaaagtgtgaatcgcccttcccttttgtacagaagatgaactgtattttgcattttgtctacttgtaagtgaatgtaacatactgtcaattttccttgtttgaatatagaattgtaacactacacggtgtacatttccagagccttgtgtatatttccaatgaacttttttgcaagcacacttgtaaccatatgtgtataattaacaaacctgtgtatgcttatgcctgggcaactattttttgtaactcttgtgtagattgtctctaaacaatgtgtgatctttattttgaaaaatacagaactttggaatctg

SEQ ID NO: 35 - DNA, 4709 bp, Homo sapiens
atgttgtcggagtgaaaggtaagggggagcgagagcgccagagagagaagatcggggggctgaaatccatcttcatcctaccgctccgcccgtgttggtggaatgagcgttgcatgtgtcttgaagagaaaagcagtgctttggcaggactctttcagcccccacctgaaacatcaccctcaagaaccagctaatcccaacatgcctgttgttttgacatctggaacagggtcgcaagcgcagccacaaccagctgcaaatcaggctcttgcagctgggactcactccagccctgtcccaggatctataggagttgcaggccgttcccaggacgacgctatggtggactacttctttcagaggcagcatggtgagcagcttgggggaggaggaagtggaggaggcggctataataatagcaaacatcgatggcctactggggataacattcatgcagaacatcaggtgcgttccatggatgaactgaatcatgattttcaagcacttgctctggagggaagagcgatgggagagccgtacccctggtaattgccagaactctgctaatgaagtggatcttctgggtccaaaccagaatggttctgagggcttagcccagctgaccagcaccaatggtgccaagcctgtggaggatttctccaacatggagtcccagagtgtccccttggaccccatggaacatgtgggcatggagcctcttcagtttgattattcaggcacgcaggtacctgtggactcagcagcagcaactgtgggactttttgactacaattctcaacaacagctgttccaaagacctaatgcgcttgctgtccagcagttgacagctgctcagcagcagcagtatgcactggcagctgctcatcagccgcacatcggtttagctcccgctgcgtttgtccccaatccatacatcatcagcgctgctcccccagggacggacccctacacagctggattggctgcagcagcgacactaggcccagctgtggtccctcaccagtattatggagttactccctggggagtctaccctgccagtcttttccagcagcaagctgccgctgccgctgcagcaactaattcagctaatcaacagaccaccccacaggctcagcaaggacagcagcaggttctccgtggaggagccagccaacgtcctttgaccccaaaccagaaccagcagggacagcaaacggatccccttgtggcagctgcagcagtgaattctgcccttgcatttggacaaggtctggcagcaggcatgccaggttatccggtgttggctcctgctgcttactatgaccaaactggtgcccttgtagtgaatgcaggcgcgagaaatggtcttggagctcctgttcgacttgtagctcctgccccagtcatcattagttcctcagctgcacaagcagctgttgcagcagccgcagcttcagcaaatggagcagctggtggtcttgctggaacaacaaatggaccatttcgccctttaggaacacagcagcctcagccccagccccagcagcagcccaataacaacctggcatccagttctttctacggcaacaactctctgaacagcaattcacagagcagctccctcttctcccagggctctgcccagcctgccaacacatccttgggattcggaagtagcagttctctcggcgccaccctgggatccgcccttggagggtttggaacagcagttgcaaactccaacactggcagtggctcccgccgtgactccctgactggcagcagtgacctttataagaggacatcgagcagcttgacccccattggacacagtttttataacggccttagcttttcctcctctcctggacccgtgggcatgcctctccctagtcagggaccaggacattcacagacaccacctccttccctctcttcacatggatcctcttcaagcttaaacctgggaggactcacgaatggcagtggaagatacatctctgctgctccaggcgctgaagccaagtaccgcagtgcaagcagcgcctccagcctcttcagcccgagcagcactcttttctcttcctctcgtttgcgatatggaatgtctgatgtcatgccttctggcaggagcaggcttttggaagattttcgaaacaaccggtaccccaatttacaactgcgggagattgctggacatataatggaattttcccaagaccagcatgggtccagattcattcagctgaaactggagcgtgccacaccagctgagcgccagcttgtcttcaatgaaatcctccaggctgcctaccaactcatggtggatgtgtttggtaattacgtcattcagaagttctttgaatttggcagtcttgaacagaagctggctttggcagaacggattcgaggccacgtcctgtcattggcactacagatgtatggctgccgtgttatccagaaagctcttgagtttattccttcagaccagcagaatgagatggttcgggaactagatggccatgtcttgaagtgtgtgaaagatcagaatggcaatcacgtggttcagaaatgcattgaatgtgtacagccccagtctttgcaatttatcatcgatgcgtttaagggacaggtatttgccttatccacacatccttatggctgccgagtgattcagagaatcctggagcactgtctccctgaccagacactccctattttagaggagcttcaccagcacacagagcagcttgtacaggatcaatatggaaattatgtaatccaacatgtactggagcacggtcgtcctgaggataaaagcaaaattgtagcagaaatccgaggcaatgtacttgtattgagtcagcacaaatttgcaagcaatgttgtggagaagtgtgttactcacgcctcacgtacggagcgcgctgtgctcatcgatgaggtgtgcaccatgaacgacggtccccacagtgccttatacaccatgatgaaggaccagtatgccaactacgtggtccagaagatgattgacgtggcggagccaggccagcggaagatcgtcatgcataagatccggccccacatcgcaactcttcgtaagtacacctatggcaagcacattctggccaagctggagaagtactacatgaagaacggtgttgacttagggcccatctgtggcccccctaatggtatcatctgaggcagtgtcacccgctgttccctcattcccgctgacctcactggcccactggcaaatccaaccagcaaccagaaatgttctagtgtagagtctgagacgggcaagtggttgctccaggattactccctcctccaaaaaaggaatcaaatccacgagtggaaaagcctttgtaaatttaattttattacacataacatgtactattttttttaattgactaattgccctgctgttttactggtgtataggatacttgtacataggtaaccaatgtacatgggaggccacatattttgttcactgttgtatctatatttcacatgtggaaactttcagggtggttggtttaacaaaaaaaaaaagctttaaaaaaaaaagaaaaaaaggaaaaggtttttagctcatttgcctggccggcaagttttgcaaatagctcttccccacctcctcattttagtaaaaaacaaacaaaaacaaaaaaacctgagaagtttgaattgtagttaaatgaccccaaactggcatttaacactgtttataaaaaatatatatatatatatatatatataatgaaaaaggtttcagagttgctaaagcttcagtttgtgacattaagtttatgaaattctaaaaaatgccttttttggagactatattatgctgaagaaggctgttcgtgaggaggagatgcgagcacccagaacgtcttttgaggctgggcgggtgtgattgtttactgcctactggatttttttctattaacattgaaaggtaaaatctgattatttagcatgagaaaaaaaaatccaactctgcttttggtcttgcttctataaatatatagtgtatacttggtgtagactttgcatatatacaaatttgtagtattttcttgttttgatgtctaatctgtatctataatgtaccctagtagtcgaacatacttttgattgtacaattgtacatttgtatacctgtaatgtaaatgtggagaagtttgaatcaacataaacacgttttttggtaagaaaagagaattagccagccctgtgcattcagtgtatattctcaccttttatggtcgtagcatatagtgttgtatattgtaaattgtaatttcaaccagaagtaaatttttttcttttgaaggaataaatgttctttatacagcctagttaatgtttaaaaagaaaaaaatagcttggttttatttgtcatctagtctcaagtatagcgagattctttctaaatgttattcaagattgagttctcactagtgtttttttaatcctaaaaaagtaatgttttgattttgtgacagtcaaaaggacgtgcaaaagtctagccttgcccgagctttccttacaatcagagcccctctcaccttgtaaaaaacctgtgtatgcttatgcctgggcaactattttttgtaactcttgtgtagattgtctctaaacaatgtgtgatctttattttgaaaaatacagaactttggaatctg

SEQ ID NO: 36 - DNA, 5076 bp, Homo sapiens
atgttgtcggagtgaaaggtaagggggagcgagagcgccagagagagaagatcggggggctgaaatccatcttcatcctaccgctccgcccgtgttggtggaatgagcgttgcatgtgtcttgaagagaaaagcagtgctttggcaggactctttcagcccccacctgaaacatcaccctcaagaaccagctaatcccaacatgcctgttgttttgacatctggaacagggtcgcaagcgcagccacaaccagctgcaaatcaggctcttgcagctgggactcactccagccctgtcccaggatctataggagttgcaggccgttcccaggacgacgctatggtggactacttctttcagaggcagcatggtgagcagcttgggggaggaggaagtggaggaggcggctataataatagcaaacatcgatggcctactggggataacattcatgcagaacatcaggtgcgttccatggatgaactgaatcatgattttcaagcacttgctctggagggaagagcgatgggagagccgtacccctggtaattgccagaactctgctaatgaagtggatcttctgggtccaaaccagaatggttctgagggcttagcccagctgaccagcaccaatggtgccaagcctgtggaggatttctccaacatggagtcccagagtgtccccttggaccccatggaacatgtgggcatggagcctcttcagtttgattattcaggcacgcaggtacctgtggactcagcagcagcaactgtgggactttttgactacaattctcaacaacagctgttccaaagacctaatgcgcttgctgtccagcagttgacagctgctcagcagcagcagtatgcactggcagctgctcatcagccgcacatcggtttagctcccgctgcgtttgtccccaatccatacatcatcagcgctgctcccccagggacggacccctacacagctggattggctgcagcagcgacactaggcccagctgtggtccctcaccagtattatggagttactccctggggagtctaccctgccagtcttttccagcagcaagctgccgctgccgctgcagcaactaattcagctaatcaacagaccaccccacaggctcagcaaggacagcagcaggttctccgtggaggagccagccaacgtcctttgaccccaaaccagaaccagcagggacagcaaacggatccccttgtggcagctgcagcagtgaattctgcccttgcatttggacaaggtctggcagcaggcatgccaggttatccggtgttggctcctgctgcttactatgaccaaactggtgcccttgtagtgaatgcaggcgcgagaaatggtcttggagctcctgttcgacttgtagctcctgccccagtcatcattagttcctcagctgcacaagcaggtgagcgcacatctgagtggactcctgccagagatctaaaagtggcgactgatagtgagattcttaaactgttgcagcagccgcagcttcagcaaatggagcagctggtggtcttgctggaacaacaaatggaccatttcgccctttaggaacacagcagcctcagccccagccccagcagcagcccaataacaacctggcatccagttctttctacggcaacaactctctgaacagcaattcacagagcagctccctcttctcccagggctctgcccagcctgccaacacatccttgggattcggaagtagcagttctctcggcgccaccctgggatccgcccttggagggtttggaacagcagttgcaaactccaacactggcagtggctcccgccgtgactccctgactggcagcagtgacctttataagaggacatcgagcagcttgacccccattggacacagtttttataacggccttagcttttcctcctctcctggacccgtgggcatgcctctccctagtcagggaccaggacattcacagacaccacctccttccctctcttcacatggatcctcttcaagcttaaacctgggaggactcacgaatggcagtggaagatacatctctgctgctccaggcgctgaagccaagtaccgcagtgcaagcagcgcctccagcctcttcagcccgagcagcactcttttctcttcctctcgtttgcgatatggaatgtctgatgtcatgccttctggcaggagcaggcttttggaagattttcgaaacaaccggtaccccaatttacaactgcgggagattgctggacatataatggaattttcccaagaccagcatgggtccagattcattcagctgaaactggagcgtgccacaccagctgagcgccagcttgtcttcaatgaaatcctccaggctgcctaccaactcatggtggatgtgtttggtaattacgtcattcagaagttctttgaatttggcagtcttgaacagaagctggctttggcagaacggattcgaggccacgtcctgtcattggcactacagatgtatggctgccgtgttatccagaaagctcttgagtttattccttcagaccagcagaatgagatggttcgggaactagatggccatgtcttgaagtgtgtgaaagatcagaatggcaatcacgtggttcagaaatgcattgaatgtgtacagccccagtctttgcaatttatcatcgatgcgtttaagggacaggtatttgccttatccacacatccttatggctgccgagtgattcagagaatcctggagcactgtctccctgaccagacactccctattttagaggagcttcaccagcacacagagcagcttgtacaggatcaatatggaaattatgtaatccaacatgtactggagcacggtcgtcctgaggataaaagcaaaattgtagcagaaatccgaggcaatgtacttgtattgagtcagcacaaatttgcaagcaatgttgtggagaagtgtgttactcacgcctcacgtacggagcgcgctgtgctcatcgatgaggtgtgcaccatgaacgacggtccccacagtgccttatacaccatgatgaaggaccagtatgccaactacgtggtccagaagatgattgacgtggcggagccaggccagcggaagatcgtcatgcataagatccggccccacatcgcaactcttcgtaagtacacctatggcaagcacattctggccaagctggagaagtactacatgaagaacggtgttgacttagggcccatctgtggcccccctaatggtatcatctgaggcagtgtcacccgctgttccctcattcccgctgacctcactggcccactggcaaatccaaccagcaaccagaaatgttctagtgtagagtctgagacgggcaagtggttgctccaggattactccctcctccaaaaaaggaatcaaatccacgagtggaaaagcctttgtaaatttaattttattacacataacatgtactattttttttaattgactaattgccctgctgttttactggtgtataggatacttgtacataggtaaccaatgtacatgggaggccacatattttgttcactgttgtatctatatttcacatgtggaaactttcagggtggttggtttaacaaaaaaaaaaagctttaaaaaaaaaagaaaaaaaggaaaaggtttttagctcatttgcctggccggcaagttttgcaaatagctcttccccacctcctcattttagtaaaaaacaaacaaaaacaaaaaaacctgagaagtttgaattgtagttaaatgaccccaaactggcatttaacactgtttataaaaaatatatatatatatatatatatataatgaaaaaggtttcagagttgctaaagcttcagtttgtgacattaagtttatgaaattctaaaaaatgccttttttggagactatattatgctgaagaaggctgttcgtgaggaggagatgcgagcacccagaacgtcttttgaggctgggcgggtgtgattgtttactgcctactggatttttttctattaacattgaaaggtaaaatctgattatttagcatgagaaaaaaaaatccaactctgcttttggtcttgcttctataaatatatagtgtatacttggtgtagactttgcatatatacaaatttgtagtattttcttgttttgatgtctaatctgtatctataatgtaccctagtagtcgaacatacttttgattgtacaattgtacatttgtatacctgtaatgtaaatgtggagaagtttgaatcaacataaacacgttttttggtaagaaaagagaattagccagccctgtgcattcagtgtatattctcaccttttatggtcgtagcatatagtgttgtatattgtaaattgtaatttcaaccagaagtaaatttttttcttttgaaggaataaatgttctttatacagcctagttaatgtttaaaaagaaaaaaatagcttggttttatttgtcatctagtctcaagtatagcgagattctttctaaatgttattcaagattgagttctcactagtgtttttttaatcctaaaaaagtaatgttttgattttgtgacagtcaaaaggacgtgcaaaagtctagccttgcccgagctttccttacaatcagagcccctctcaccttgtaaagtgtgaatcgcccttcccttttgtacagaagatgaactgtattttgcattttgtctacttgtaagtgaatgtaacatactgtcaattttccttgtttgaatatagaattgtaacactacacggtgtacatttccagagccttgtgtatatttccaatgaacttttttgcaagcacacttgtaaccatatgtgtataattaacaaacctgtgtatgcttatgcctgggcaactattttttgtaactcttgtgtagattgtctctaaacaatgtgtgatctttattttgaaaaatacagaactttggaatctgaaaaaaaaaaaaaaaaaaaaaaaamaamaaaaasaaaaaacaaaacaaaaacarrmaamaraaamaaacacaaaaraaarammaaaacacaacaaca

SEQ ID NO: 37 - DNA, 4979 bp, Homo sapiens
atgttgtcggagtgaaaggtaagggggagcgagagcgccagagagagaagatcggggggctgaaatccatcttcatcctaccgctccgcccgtgttggtggaatgagcgttgcatgtgtcttgaagagaaaagcagtgctttggcaggactctttcagcccccacctgaaacatcaccctcaagaaccagctaatcccaacatgcctgttgttttgacatctggaacagggtcgcaagcgcagccacaaccagctgcaaatcaggctcttgcagctgggactcactccagccctgtcccaggatctataggagttgcaggccgttcccaggacgacgctatggtggactacttctttcagaggcagcatggtgagcagcttgggggaggaggaagtggaggaggcggctataataatagcaaacatcgatggcctactggggataacattcatgcagaacatcaggtgcgttccatggatgaactgaatcatgattttcaagcacttgctctggagggaagagcgatgggagagccgtacccctggtaattgccagaactctgctaatgaagtggatcttctgggtccaaaccagaatggttctgagggcttagcccagctgaccagcaccaatggtgccaagcctgtggaggatttctccaacatggagtcccagagtgtccccttggaccccatggaacatgtgggcatggagcctcttcagtttgattattcaggcacgcaggtacctgtggactcagcagcagcaactgtgggactttttgactacaattctcaacaacagctgttccaaagacctaatgcgcttgctgtccagcagttgacagctgctcagcagcagcagtatgcactggcagctgctcatcagccgcacatcggtttagctcccgctgcgtttgtccccaatccatacatcatcagcgctgctcccccagggacggacccctacacagctggattggctgcagcagcgacactaggcccagctgtggtccctcaccagtattatggagttactccctggggagtctaccctgccagtcttttccagcagcaagctgccgctgccgctgcagcaactaattcagctaatcaacagaccaccccacaggctcagcaaggacagcagcaggttctccgtggaggagccagccaacgtcctttgaccccaaaccagaaccagcagggacagcaaacggatccccttgtggcagctgcagcagtgaattctgcccttgcatttggacaaggtctggcagcaggcatgccaggttatccggtgttggctcctgctgcttactatgaccaaactggtgcccttgtagtgaatgcaggcgcgagaaatggtcttggagctcctgttcgacttgtagctcctgccccagtcatcattagttcctcagctgcacaagcaggtgagcgcacatctgagtggactcctgccagagatctaaaagtggcgactgatagtgagattcttaaactgttgcagcagccgcagcttcagcaaatggagcagctggtggtcttgctggaacaacaaatggaccatttcgccctttaggaacacagcagcctcagccccagccccagcagcagcccaataacaacctggcatccagttctttctacggcaacaactctctgaacagcaattcacagagcagctccctcttctcccagggctctgcccagcctgccaacacatccttgggattcggaagtagcagttctctcggcgccaccctgggatccgcccttggagggtttggaacagcagttgcaaactccaacactggcagtggctcccgccgtgactccctgactggcagcagtgacctttataagaggacatcgagcagcttgacccccattggacacagtttttataacggccttagcttttcctcctctcctggacccgtgggcatgcctctccctagtcagggaccaggacattcacagacaccacctccttccctctcttcacatggatcctcttcaagcttaaacctgggaggactcacgaatggcagtggaagatacatctctgctgctccaggcgctgaagccaagtaccgcagtgcaagcagcgcctccagcctcttcagcccgagcagcactcttttctcttcctctcgtttgcgatatggaatgtctgatgtcatgccttctggcaggagcaggcttttggaagattttcgaaacaaccggtaccccaatttacaactgcgggagattgctggacatataatggaattttcccaagaccagcatgggtccagattcattcagctgaaactggagcgtgccacaccagctgagcgccagcttgtcttcaatgaaatcctccaggctgcctaccaactcatggtggatgtgtttggtaattacgtcattcagaagttctttgaatttggcagtcttgaacagaagctggctttggcagaacggattcgaggccacgtcctgtcattggcactacagatgtatggctgccgtgttatccagaaagctcttgagtttattccttcagaccagcagaatgagatggttcgggaactagatggccatgtcttgaagtgtgtgaaagatcagaatggcaatcacgtggttcagaaatgcattgaatgtgtacagccccagtctttgcaatttatcatcgatgcgtttaagggacaggtatttgccttatccacacatccttatggctgccgagtgattcagagaatcctggagcactgtctccctgaccagacactccctattttagaggagcttcaccagcacacagagcagcttgtacaggatcaatatggaaattatgtaatccaacatgtactggagcacggtcgtcctgaggataaaagcaaaattgtagcagaaatccgaggcaatgtacttgtattgagtcagcacaaatttgcaagcaatgttgtggagaagtgtgttactcacgcctcacgtacggagcgcgctgtgctcatcgatgaggtgtgcaccatgaacgacggtccccacagtgccttatacaccatgatgaaggaccagtatgccaactacgtggtccagaagatgattgacgtggcggagccaggccagcggaagatcgtcatgcataagatccggccccacatcgcaactcttcgtaagtacacctatggcaagcacattctggccaagctggagaagtactacatgaagaacggtgttgacttagggcccatctgtggcccccctaatggtatcatctgaggcagtgtcacccgctgttccctcattcccgctgacctcactggcccactggcaaatccaaccagcaaccagaaatgttctagtgtagagtctgagacgggcaagtggttgctccaggattactccctcctccaaaaaaggaatcaaatccacgagtggaaaagcctttgtaaatttaattttattacacataacatgtactattttttttaattgactaattgccctgctgttttactggtgtataggatacttgtacataggtaaccaatgtacatgggaggccacatattttgttcactgttgtatctatatttcacatgtggaaactttcagggtggttggtttaacaaaaaaaaaaagctttaaaaaaaaaagaaaaaaaggaaaaggtttttagctcatttgcctggccggcaagttttgcaaatagctcttccccacctcctcattttagtaaaaaacaaacaaaaacaaaaaaacctgagaagtttgaattgtagttaaatgaccccaaactggcatttaacactgtttataaaaaatatatatatatatatatatatataatgaaaaaggtttcagagttgctaaagcttcagtttgtgacattaagtttatgaaattctaaaaaatgccttttttggagactatattatgctgaagaaggctgttcgtgaggaggagatgcgagcacccagaacgtcttttgaggctgggcgggtgtgattgtttactgcctactggatttttttctattaacattgaaaggtaaaatctgattatttagcatgagaaaaaaaaatccaactctgcttttggtcttgcttctataaatatatagtgtatacttggtgtagactttgcatatatacaaatttgtagtattttcttgttttgatgtctaatctgtatctataatgtaccctagtagtcgaacatacttttgattgtacaattgtacatttgtatacctgtaatgtaaatgtggagaagtttgaatcaacataaacacgttttttggtaagaaaagagaattagccagccctgtgcattcagtgtatattctcaccttttatggtcgtagcatatagtgttgtatattgtaaattgtaatttcaaccagaagtaaatttttttcttttgaaggaataaatgttctttatacagcctagttaatgtttaaaaagaaaaaaatagcttggttttatttgtcatctagtctcaagtatagcgagattctttctaaatgttattcaagattgagttctcactagtgtttttttaatcctaaaaaagtaatgttttgattttgtgacagtcaaaaggacgtgcaaaagtctagccttgcccgagctttccttacaatcagagcccctctcaccttgtaaagtgtgaatcgcccttcccttttgtacagaagatgaactgtattttgcattttgtctacttgtaagtgaatgtaacatactgtcaattttccttgtttgaatatagaattgtaacactacacggtgtacatttccagagccttgtgtatatttccaatgaacttttttgcaagcacacttgtaaccatatgtgtataattaacaaacctgtgtatgcttatgcctgggcaactattttttgtaactcttgtgtagattgtctctaaacaatgtgtgatctttattttgaaaaatacagaactttggaatctg

SEQ ID NO: 38 - DNA, 4777 bp, Homo sapiens
atgttgtcggagtgaaaggtaagggggagcgagagcgccagagagagaagatcggggggctgaaatccatcttcatcctaccgctccgcccgtgttggtggaatgagcgttgcatgtgtcttgaagagaaaagcagtgctttggcaggactctttcagcccccacctgaaacatcaccctcaagaaccagctaatcccaacatgcctgttgttttgacatctggaacagggtcgcaagcgcagccacaaccagctgcaaatcaggctcttgcagctgggactcactccagccctgtcccaggatctataggagttgcaggccgttcccaggacgacgctatggtggactacttctttcagaggcagcatggtgagcagcttgggggaggaggaagtggaggaggcggctataataatagcaaacatcgatggcctactggggataacattcatgcagaacatcaggtgcgttccatggatgaactgaatcatgattttcaagcacttgctctggagggaagagcgatgggagagccgtacccctggtaattgccagaactctgctaatgaagtggatcttctgggtccaaaccagaatggttctgagggcttagcccagctgaccagcaccaatggtgccaagcctgtggaggatttctccaacatggagtcccagagtgtccccttggaccccatggaacatgtgggcatggagcctcttcagtttgattattcaggcacgcaggtacctgtggactcagcagcagcaactgtgggactttttgactacaattctcaacaacagctgttccaaagacctaatgcgcttgctgtccagcagttgacagctgctcagcagcagcagtatgcactggcagctgctcatcagccgcacatcggtttagctcccgctgcgtttgtccccaatccatacatcatcagcgctgctcccccagggacggacccctacacagctggattggctgcagcagcgacactaggcccagctgtggtccctcaccagtattatggagttactccctggggagtctaccctgccagtcttttccagcagcaagctgccgctgccgctgcagcaactaattcagctaatcaacagaccaccccacaggctcagcaaggacagcagcaggttctccgtggaggagccagccaacgtcctttgaccccaaaccagaaccagcagggacagcaaacggatccccttgtggcagctgcagcagtgaattctgcccttgcatttggacaaggtctggcagcaggcatgccaggttatccggtgttggctcctgctgcttactatgaccaaactggtgcccttgtagtgaatgcaggcgcgagaaatggtcttggagctcctgttcgacttgtagctcctgccccagtcatcattagttcctcagctgcacaagcaggtgagcgcacatctgagtggactcctgccagagatctaaaagtggcgactgatagtgagattcttaaactgttgcagcagccgcagcttcagcaaatggagcagctggtggtcttgctggaacaacaaatggaccatttcgccctttaggaacacagcagcctcagccccagccccagcagcagcccaataacaacctggcatccagttctttctacggcaacaactctctgaacagcaattcacagagcagctccctcttctcccagggctctgcccagcctgccaacacatccttgggattcggaagtagcagttctctcggcgccaccctgggatccgcccttggagggtttggaacagcagttgcaaactccaacactggcagtggctcccgccgtgactccctgactggcagcagtgacctttataagaggacatcgagcagcttgacccccattggacacagtttttataacggccttagcttttcctcctctcctggacccgtgggcatgcctctccctagtcagggaccaggacattcacagacaccacctccttccctctcttcacatggatcctcttcaagcttaaacctgggaggactcacgaatggcagtggaagatacatctctgctgctccaggcgctgaagccaagtaccgcagtgcaagcagcgcctccagcctcttcagcccgagcagcactcttttctcttcctctcgtttgcgatatggaatgtctgatgtcatgccttctggcaggagcaggcttttggaagattttcgaaacaaccggtaccccaatttacaactgcgggagattgctggacatataatggaattttcccaagaccagcatgggtccagattcattcagctgaaactggagcgtgccacaccagctgagcgccagcttgtcttcaatgaaatcctccaggctgcctaccaactcatggtggatgtgtttggtaattacgtcattcagaagttctttgaatttggcagtcttgaacagaagctggctttggcagaacggattcgaggccacgtcctgtcattggcactacagatgtatggctgccgtgttatccagaaagctcttgagtttattccttcagaccagcagaatgagatggttcgggaactagatggccatgtcttgaagtgtgtgaaagatcagaatggcaatcacgtggttcagaaatgcattgaatgtgtacagccccagtctttgcaatttatcatcgatgcgtttaagggacaggtatttgccttatccacacatccttatggctgccgagtgattcagagaatcctggagcactgtctccctgaccagacactccctattttagaggagcttcaccagcacacagagcagcttgtacaggatcaatatggaaattatgtaatccaacatgtactggagcacggtcgtcctgaggataaaagcaaaattgtagcagaaatccgaggcaatgtacttgtattgagtcagcacaaatttgcaagcaatgttgtggagaagtgtgttactcacgcctcacgtacggagcgcgctgtgctcatcgatgaggtgtgcaccatgaacgacggtccccacagtgccttatacaccatgatgaaggaccagtatgccaactacgtggtccagaagatgattgacgtggcggagccaggccagcggaagatcgtcatgcataagatccggccccacatcgcaactcttcgtaagtacacctatggcaagcacattctggccaagctggagaagtactacatgaagaacggtgttgacttagggcccatctgtggcccccctaatggtatcatctgaggcagtgtcacccgctgttccctcattcccgctgacctcactggcccactggcaaatccaaccagcaaccagaaatgttctagtgtagagtctgagacgggcaagtggttgctccaggattactccctcctccaaaaaaggaatcaaatccacgagtggaaaagcctttgtaaatttaattttattacacataacatgtactattttttttaattgactaattgccctgctgttttactggtgtataggatacttgtacataggtaaccaatgtacatgggaggccacatattttgttcactgttgtatctatatttcacatgtggaaactttcagggtggttggtttaacaaaaaaaaaaagctttaaaaaaaaaagaaaaaaaggaaaaggtttttagctcatttgcctggccggcaagttttgcaaatagctcttccccacctcctcattttagtaaaaaacaaacaaaaacaaaaaaacctgagaagtttgaattgtagttaaatgaccccaaactggcatttaacactgtttataaaaaatatatatatatatatatatatataatgaaaaaggtttcagagttgctaaagcttcagtttgtgacattaagtttatgaaattctaaaaaatgccttttttggagactatattatgctgaagaaggctgttcgtgaggaggagatgcgagcacccagaacgtcttttgaggctgggcgggtgtgattgtttactgcctactggatttttttctattaacattgaaaggtaaaatctgattatttagcatgagaaaaaaaaatccaactctgcttttggtcttgcttctataaatatatagtgtatacttggtgtagactttgcatatatacaaatttgtagtattttcttgttttgatgtctaatctgtatctataatgtaccctagtagtcgaacatacttttgattgtacaattgtacatttgtatacctgtaatgtaaatgtggagaagtttgaatcaacataaacacgttttttggtaagaaaagagaattagccagccctgtgcattcagtgtatattctcaccttttatggtcgtagcatatagtgttgtatattgtaaattgtaatttcaaccagaagtaaatttttttcttttgaaggaataaatgttctttatacagcctagttaatgtttaaaaagaaaaaaatagcttggttttatttgtcatctagtctcaagtatagcgagattctttctaaatgttattcaagattgagttctcactagtgtttttttaatcctaaaaaagtaatgttttgattttgtgacagtcaaaaggacgtgcaaaagtctagccttgcccgagctttccttacaatcagagcccctctcaccttgtaaaaaacctgtgtatgcttatgcctgggcaactattttttgtaactcttgtgtagattgtctctaaacaatgtgtgatctttattttgaaaaatacagaactttggaatctg

SEQ ID NO: 39 - DNA, 4927 bp, Homo sapiens
atgttgtcggagtgaaaggtaagggggagcgagagcgccagagagagaagatcggggggctgaaatccatcttcatcctaccgctccgcccgtgttggtggaatgagcgttgcatgtgtcttgaagagaaaagcagtgctttggcaggactctttcagcccccacctgaaacatcaccctcaagaaccagctaatcccaacatgcctgttgttttgacatctggaacagggtcgcaagcgcagccacaaccagctgcaaatcaggctcttgcagctgggactcactccagccctgtcccaggatctataggagttgcaggccgttcccaggacgacgctatggtggactacttctttcagaggcagcatggtgagcagcttgggggaggaggaagtggaggaggcggctataataatagcaaacatcgatggcctactggggataacattcatgcagaacatcaggtgcgttccatggatgaactgaatcatgattttcaagcacttgctctggagggaagagcgatgggagagccgtacccctggtaattgccagaactctgctaatgaagtggatcttctgggtccaaaccagaatggttctgagggcttagcccagctgaccagcaccaatggtgccaagcctgtggaggatttctccaacatggagtcccagagtgtccccttggaccccatggaacatgtgggcatggagcctcttcagtttgattattcaggcacgcaggtacctgtggactcagcagcagcaactgtgggactttttgactacaattctcaacaacagctgttccaaagacctaatgcgcttgctgtccagcagttgacagctgctcagcagcagcagtatgcactggcagctgctcatcagccgcacatcggtttagctcccgctgcgtttgtccccaatccatacatcatcagcgctgctcccccagggacggacccctacacagctggattggctgcagcagcgacactaggcccagctgtggtccctcaccagtattatggagttactccctggggagtctaccctgccagtcttttccagcagcaagctgccgctgccgctgcagcaactaattcagctaatcaacagaccaccccacaggctcagcaaggacagcagcaggttctccgtggaggagccagccaacgtcctttgaccccaaaccagaaccagcagggacagcaaacggatccccttgtggcagctgcagcagtgaattctgcccttgcatttggacaaggtctggcagcaggcatgccaggttatccggtgttggctcctgctgcttactatgaccaaactggtgcccttgtagtgaatgcaggcgcgagaaatggtcttggagctcctgttcgacttgtagctcctgccccagtcatcattagttcctcagctgcacaagcaggaacacagcagcctcagccccagccccagcagcagcccaataacaacctggcatccagttctttctacggcaacaactctctgaacagcaattcacagagcagctccctcttctcccagggctctgcccagcctgccaacacatccttgggattcggaagtagcagttctctcggcgccaccctgggatccgcccttggagggtttggaacagcagttgcaaactccaacactggcagtggctcccgccgtgactccctgactggcagcagtgacctttataagaggacatcgagcagcttgacccccattggacacagtttttataacggccttagcttttcctcctctcctggacccgtgggcatgcctctccctagtcagggaccaggacattcacagacaccacctccttccctctcttcacatggatcctcttcaagcttaaacctgggaggactcacgaatggcagtggaagatacatctctgctgctccaggcgctgaagccaagtaccgcagtgcaagcagcgcctccagcctcttcagcccgagcagcactcttttctcttcctctcgtttgcgatatggaatgtctgatgtcatgccttctggcaggagcaggcttttggaagattttcgaaacaaccggtaccccaatttacaactgcgggagattgctggacatataatggaattttcccaagaccagcatgggtccagattcattcagctgaaactggagcgtgccacaccagctgagcgccagcttgtcttcaatgaaatcctccaggctgcctaccaactcatggtggatgtgtttggtaattacgtcattcagaagttctttgaatttggcagtcttgaacagaagctggctttggcagaacggattcgaggccacgtcctgtcattggcactacagatgtatggctgccgtgttatccagaaagctcttgagtttattccttcagaccagcagaatgagatggttcgggaactagatggccatgtcttgaagtgtgtgaaagatcagaatggcaatcacgtggttcagaaatgcattgaatgtgtacagccccagtctttgcaatttatcatcgatgcgtttaagggacaggtatttgccttatccacacatccttatggctgccgagtgattcagagaatcctggagcactgtctccctgaccagacactccctattttagaggagcttcaccagcacacagagcagcttgtacaggatcaatatggaaattatgtaatccaacatgtactggagcacggtcgtcctgaggataaaagcaaaattgtagcagaaatccgaggcaatgtacttgtattgagtcagcacaaatttgcaagcaatgttgtggagaagtgtgttactcacgcctcacgtacggagcgcgctgtgctcatcgatgaggtgtgcaccatgaacgacggtccccacagtgccttatacaccatgatgaaggaccagtatgccaactacgtggtccagaagatgattgacgtggcggagccaggccagcggaagatcgtcatgcataagatccggccccacatcgcaactcttcgtaagtacacctatggcaagcacattctggccaagctggagaagtactacatgaagaacggtgttgacttagggcccatctgtggcccccctaatggtatcatctgaggcagtgtcacccgctgttccctcattcccgctgacctcactggcccactggcaaatccaaccagcaaccagaaatgttctagtgtagagtctgagacgggcaagtggttgctccaggattactccctcctccaaaaaaggaatcaaatccacgagtggaaaagcctttgtaaatttaattttattacacataacatgtactattttttttaattgactaattgccctgctgttttactggtgtataggatacttgtacataggtaaccaatgtacatgggaggccacatattttgttcactgttgtatctatatttcacatgtggaaactttcagggtggttggtttaacaaaaaaaaaaagctttaaaaaaaaaagaaaaaaaggaaaaggtttttagctcatttgcctggccggcaagttttgcaaatagctcttccccacctcctcattttagtaaaaaacaaacaaaaacaaaaaaacctgagaagtttgaattgtagttaaatgaccccaaactggcatttaacactgtttataaaaaatatatatatatatatatatatataatgaaaaaggtttcagagttgctaaagcttcagtttgtgacattaagtttatgaaattctaaaaaatgccttttttggagactatattatgctgaagaaggctgttcgtgaggaggagatgcgagcacccagaacgtcttttgaggctgggcgggtgtgattgtttactgcctactggatttttttctattaacattgaaaggtaaaatctgattatttagcatgagaaaaaaaaatccaactctgcttttggtcttgcttctataaatatatagtgtatacttggtgtagactttgcatatatacaaatttgtagtattttcttgttttgatgtctaatctgtatctataatgtaccctagtagtcgaacatacttttgattgtacaattgtacatttgtatacctgtaatgtaaatgtggagaagtttgaatcaacataaacacgttttttggtaagaaaagagaattagccagccctgtgcattcagtgtatattctcaccttttatggtcgtagcatatagtgttgtatattgtaaattgtaatttcaaccagaagtaaatttttttcttttgaaggaataaatgttctttatacagcctagttaatgtttaaaaagaaaaaaatagcttggttttatttgtcatctagtctcaagtatagcgagattctttctaaatgttattcaagattgagttctcactagtgtttttttaatcctaaaaaagtaatgttttgattttgtgacagtcaaaaggacgtgcaaaagtctagccttgcccgagctttccttacaatcagagcccctctcaccttgtaaagtgtgaatcgcccttcccttttgtacagaagatgaactgtattttgcattttgtctacttgtaagtgaatgtaacatactgtcaattttccttgtttgaatatagaattgtaacactacacggtgtacatttccagagccttgtgtatatttccaatgaacttttttgcaagcacacttgtaaccatatgtgtataattaacaaacctgtgtatgcttatgcctgggcaactattttttgtaactcttgtgtagattgtctctaaacaatgtgtgatctttattttgaaaaatacagaactttggaatctgaaaaaaaaaaaaaaaaaaaaaaaamaamaaaaasaaaaaacaaaacaaaaacarrmaamaraaamaaacacaaaaraaarammaaaacacaacaaca

SEQ ID NO: 40 - DNA, 4830 bp, Homo sapiens
atgttgtcggagtgaaaggtaagggggagcgagagcgccagagagagaagatcggggggctgaaatccatcttcatcctaccgctccgcccgtgttggtggaatgagcgttgcatgtgtcttgaagagaaaagcagtgctttggcaggactctttcagcccccacctgaaacatcaccctcaagaaccagctaatcccaacatgcctgttgttttgacatctggaacagggtcgcaagcgcagccacaaccagctgcaaatcaggctcttgcagctgggactcactccagccctgtcccaggatctataggagttgcaggccgttcccaggacgacgctatggtggactacttctttcagaggcagcatggtgagcagcttgggggaggaggaagtggaggaggcggctataataatagcaaacatcgatggcctactggggataacattcatgcagaacatcaggtgcgttccatggatgaactgaatcatgattttcaagcacttgctctggagggaagagcgatgggagagccgtacccctggtaattgccagaactctgctaatgaagtggatcttctgggtccaaaccagaatggttctgagggcttagcccagctgaccagcaccaatggtgccaagcctgtggaggatttctccaacatggagtcccagagtgtccccttggaccccatggaacatgtgggcatggagcctcttcagtttgattattcaggcacgcaggtacctgtggactcagcagcagcaactgtgggactttttgactacaattctcaacaacagctgttccaaagacctaatgcgcttgctgtccagcagttgacagctgctcagcagcagcagtatgcactggcagctgctcatcagccgcacatcggtttagctcccgctgcgtttgtccccaatccatacatcatcagcgctgctcccccagggacggacccctacacagctggattggctgcagcagcgacactaggcccagctgtggtccctcaccagtattatggagttactccctggggagtctaccctgccagtcttttccagcagcaagctgccgctgccgctgcagcaactaattcagctaatcaacagaccaccccacaggctcagcaaggacagcagcaggttctccgtggaggagccagccaacgtcctttgaccccaaaccagaaccagcagggacagcaaacggatccccttgtggcagctgcagcagtgaattctgcccttgcatttggacaaggtctggcagcaggcatgccaggttatccggtgttggctcctgctgcttactatgaccaaactggtgcccttgtagtgaatgcaggcgcgagaaatggtcttggagctcctgttcgacttgtagctcctgccccagtcatcattagttcctcagctgcacaagcaggaacacagcagcctcagccccagccccagcagcagcccaataacaacctggcatccagttctttctacggcaacaactctctgaacagcaattcacagagcagctccctcttctcccagggctctgcccagcctgccaacacatccttgggattcggaagtagcagttctctcggcgccaccctgggatccgcccttggagggtttggaacagcagttgcaaactccaacactggcagtggctcccgccgtgactccctgactggcagcagtgacctttataagaggacatcgagcagcttgacccccattggacacagtttttataacggccttagcttttcctcctctcctggacccgtgggcatgcctctccctagtcagggaccaggacattcacagacaccacctccttccctctcttcacatggatcctcttcaagcttaaacctgggaggactcacgaatggcagtggaagatacatctctgctgctccaggcgctgaagccaagtaccgcagtgcaagcagcgcctccagcctcttcagcccgagcagcactcttttctcttcctctcgtttgcgatatggaatgtctgatgtcatgccttctggcaggagcaggcttttggaagattttcgaaacaaccggtaccccaatttacaactgcgggagattgctggacatataatggaattttcccaagaccagcatgggtccagattcattcagctgaaactggagcgtgccacaccagctgagcgccagcttgtcttcaatgaaatcctccaggctgcctaccaactcatggtggatgtgtttggtaattacgtcattcagaagttctttgaatttggcagtcttgaacagaagctggctttggcagaacggattcgaggccacgtcctgtcattggcactacagatgtatggctgccgtgttatccagaaagctcttgagtttattccttcagaccagcagaatgagatggttcgggaactagatggccatgtcttgaagtgtgtgaaagatcagaatggcaatcacgtggttcagaaatgcattgaatgtgtacagccccagtctttgcaatttatcatcgatgcgtttaagggacaggtatttgccttatccacacatccttatggctgccgagtgattcagagaatcctggagcactgtctccctgaccagacactccctattttagaggagcttcaccagcacacagagcagcttgtacaggatcaatatggaaattatgtaatccaacatgtactggagcacggtcgtcctgaggataaaagcaaaattgtagcagaaatccgaggcaatgtacttgtattgagtcagcacaaatttgcaagcaatgttgtggagaagtgtgttactcacgcctcacgtacggagcgcgctgtgctcatcgatgaggtgtgcaccatgaacgacggtccccacagtgccttatacaccatgatgaaggaccagtatgccaactacgtggtccagaagatgattgacgtggcggagccaggccagcggaagatcgtcatgcataagatccggccccacatcgcaactcttcgtaagtacacctatggcaagcacattctggccaagctggagaagtactacatgaagaacggtgttgacttagggcccatctgtggcccccctaatggtatcatctgaggcagtgtcacccgctgttccctcattcccgctgacctcactggcccactggcaaatccaaccagcaaccagaaatgttctagtgtagagtctgagacgggcaagtggttgctccaggattactccctcctccaaaaaaggaatcaaatccacgagtggaaaagcctttgtaaatttaattttattacacataacatgtactattttttttaattgactaattgccctgctgttttactggtgtataggatacttgtacataggtaaccaatgtacatgggaggccacatattttgttcactgttgtatctatatttcacatgtggaaactttcagggtggttggtttaacaaaaaaaaaaagctttaaaaaaaaaagaaaaaaaggaaaaggtttttagctcatttgcctggccggcaagttttgcaaatagctcttccccacctcctcattttagtaaaaaacaaacaaaaacaaaaaaacctgagaagtttgaattgtagttaaatgaccccaaactggcatttaacactgtttataaaaaatatatatatatatatatatatataatgaaaaaggtttcagagttgctaaagcttcagtttgtgacattaagtttatgaaattctaaaaaatgccttttttggagactatattatgctgaagaaggctgttcgtgaggaggagatgcgagcacccagaacgtcttttgaggctgggcgggtgtgattgtttactgcctactggatttttttctattaacattgaaaggtaaaatctgattatttagcatgagaaaaaaaaatccaactctgcttttggtcttgcttctataaatatatagtgtatacttggtgtagactttgcatatatacaaatttgtagtattttcttgttttgatgtctaatctgtatctataatgtaccctagtagtcgaacatacttttgattgtacaattgtacatttgtatacctgtaatgtaaatgtggagaagtttgaatcaacataaacacgttttttggtaagaaaagagaattagccagccctgtgcattcagtgtatattctcaccttttatggtcgtagcatatagtgttgtatattgtaaattgtaatttcaaccagaagtaaatttttttcttttgaaggaataaatgttctttatacagcctagttaatgtttaaaaagaaaaaaatagcttggttttatttgtcatctagtctcaagtatagcgagattctttctaaatgttattcaagattgagttctcactagtgtttttttaatcctaaaaaagtaatgttttgattttgtgacagtcaaaaggacgtgcaaaagtctagccttgcccgagctttccttacaatcagagcccctctcaccttgtaaagtgtgaatcgcccttcccttttgtacagaagatgaactgtattttgcattttgtctacttgtaagtgaatgtaacatactgtcaattttccttgtttgaatatagaattgtaacactacacggtgtacatttccagagccttgtgtatatttccaatgaacttttttgcaagcacacttgtaaccatatgtgtataattaacaaacctgtgtatgcttatgcctgggcaactattttttgtaactcttgtgtagattgtctctaaacaatgtgtgatctttattttgaaaaatacagaactttggaatctg

SEQ ID NO: 41 - DNA, 4988 bp, Homo sapiens
atgttgtcggagtgaaaggtaagggggagcgagagcgccagagagagaagatcggggggctgaaatccatcttcatcctaccgctccgcccgtgttggtggaatgagcgttgcatgtgtcttgaagagaaaagcagtgctttggcaggactctttcagcccccacctgaaacatcaccctcaagaaccagctaatcccaacatgcctgttgttttgacatctggaacagggtcgcaagcgcagccacaaccagctgcaaatcaggctcttgcagctgggactcactccagccctgtcccaggatctataggagttgcaggccgttcccaggacgacgctatggtggactacttctttcagaggcagcatggtgcgttccatggatgaactgaatcatgattttcaagcacttgctctggagggaagagcgatgggagagcagctcttgccaggtaaaaagttttgggaaacagatgaatccagcaaagatggaccaaaaggaatattcctgggtgatcaatggcgagacagtgcctggggaacatcagatcattcagtttcccagccaatcatggtgcagagaagacctggtcagagtttccatgtgaacagtgaggtcaattctgtactgtccccacgatcggagagtgggggactaggcgttagcatggtggagtatgtgttgagctcatccccgggcgattcctgtctaagaaaaggaggatttggcccaagggatgcagacagtgatgaaaacgacaaaggtgaaaagaagaacaagggtacgtttgatggagataagctaggagatttgaaggaggagggtgatgtgatggacaagaccaatggtttaccagtgcagaatgggattgatgcagacgtcaaagattttagccgtacccctggtaattgccagaactctgctaatgaagtggatcttctgggtccaaaccagaatggttctgagggcttagcccagctgaccagcaccaatggtgccaagcctgtggaggatttctccaacatggagtcccagagtgtccccttggaccccatggaacatgtgggcatggagcctcttcagtttgattattcaggcacgcaggtacctgtggactcagcagcagcaactgtgggactttttgactacaattctcaacaacagctgttccaaagacctaatgcgcttgctgtccagcagttgacagctgctcagcagcagcagtatgcactggcagctgctcatcagccgcacatcggtttagctcccgctgcgtttgtccccaatccatacatcatcagcgctgctcccccagggacggacccctacacagctggattggctgcagcagcgacactaggcccagctgtggtccctcaccagtattatggagttactccctggggagtctaccctgccagtcttttccagcagcaagctgccgctgccgctgcagcaactaattcagctaatcaacagaccaccccacaggctcagcaaggacagcagcaggttctccgtggaggagccagccaacgtcctttgaccccaaaccagaaccagcagggacagcaaacggatccccttgtggcagctgcagcagtgaattctgcccttgcatttggacaaggtctggcagcaggcatgccaggttatccggtgttggctcctgctgcttactatgaccaaactggtgcccttgtagtgaatgcaggcgcgagaaatggtcttggagctcctgttcgacttgtagctcctgccccagtcatcattagttcctcagctgcacaagcaggaacacagcagcctcagccccagccccagcagcagcccaataacaacctggcatccagttctttctacggcaacaactctctgaacagcaattcacagagcagctccctcttctcccagggctctgcccagcctgccaacacatccttgggattcggaagtagcagttctctcggcgccaccctgggatccgcccttggagggtttggaacagcagttgcaaactccaacactggcagtggctcccgccgtgactccctgactggcagcagtgacctttataagaggacatcgagcagcttgacccccattggacacagtttttataacggccttagcttttcctcctctcctggacccgtgggcatgcctctccctagtcagggaccaggacattcacagacaccacctccttccctctcttcacatggatcctcttcaagcttaaacctgggaggactcacgaatggcagtggaagatacatctctgctgctccaggcgctgaagccaagtaccgcagtgcaagcagcgcctccagcctcttcagcccgagcagcactcttttctcttcctctcgtttgcgatatggaatgtctgatgtcatgccttctggcaggagcaggcttttggaagattttcgaaacaaccggtaccccaatttacaactgcgggagattgctggacatataatggaattttcccaagaccagcatgggtccagattcattcagctgaaactggagcgtgccacaccagctgagcgccagcttgtcttcaatgaaatcctccaggctgcctaccaactcatggtggatgtgtttggtaattacgtcattcagaagttctttgaatttggcagtcttgaacagaagctggctttggcagaacggattcgaggccacgtcctgtcattggcactacagatgtatggctgccgtgttatccagaaagctcttgagtttattccttcagaccagcagaatgagatggttcgggaactagatggccatgtcttgaagtgtgtgaaagatcagaatggcaatcacgtggttcagaaatgcattgaatgtgtacagccccagtctttgcaatttatcatcgatgcgtttaagggacaggtatttgccttatccacacatccttatggctgccgagtgattcagagaatcctggagcactgtctccctgaccagacactccctattttagaggagcttcaccagcacacagagcagcttgtacaggatcaatatggaaattatgtaatccaacatgtactggagcacggtcgtcctgaggataaaagcaaaattgtagcagaaatccgaggcaatgtacttgtattgagtcagcacaaatttgcaagcaatgttgtggagaagtgtgttactcacgcctcacgtacggagcgcgctgtgctcatcgatgaggtgtgcaccatgaacgacggtccccacagtgccttatacaccatgatgaaggaccagtatgccaactacgtggtccagaagatgattgacgtggcggagccaggccagcggaagatcgtcatgcataagatccggccccacatcgcaactcttcgtaagtacacctatggcaagcacattctggccaagctggagaagtactacatgaagaacggtgttgacttagggcccatctgtggcccccctaatggtatcatctgaggcagtgtcacccgctgttccctcattcccgctgacctcactggcccactggcaaatccaaccagcaaccagaaatgttctagtgtagagtctgagacgggcaagtggttgctccaggattactccctcctccaaaaaaggaatcaaatccacgagtggaaaagcctttgtaaatttaattttattacacataacatgtactattttttttaattgactaattgccctgctgttttactggtgtataggatacttgtacataggtaaccaatgtacatgggaggccacatattttgttcactgttgtatctatatttcacatgtggaaactttcagggtggttggtttaacaaaaaaaaaaagctttaaaaaaaaaagaaaaaaaggaaaaggtttttagctcatttgcctggccggcaagttttgcaaatagctcttccccacctcctcattttagtaaaaaacaaacaaaaacaaaaaaacctgagaagtttgaattgtagttaaatgaccccaaactggcatttaacactgtttataaaaaatatatatatatatatatatatataatgaaaaaggtttcagagttgctaaagcttcagtttgtgacattaagtttatgaaattctaaaaaatgccttttttggagactatattatgctgaagaaggctgttcgtgaggaggagatgcgagcacccagaacgtcttttgaggctgggcgggtgtgattgtttactgcctactggatttttttctattaacattgaaaggtaaaatctgattatttagcatgagaaaaaaaaatccaactctgcttttggtcttgcttctataaatatatagtgtatacttggtgtagactttgcatatatacaaatttgtagtattttcttgttttgatgtctaatctgtatctataatgtaccctagtagtcgaacatacttttgattgtacaattgtacatttgtatacctgtaatgtaaatgtggagaagtttgaatcaacataaacacgttttttggtaagaaaagagaattagccagccctgtgcattcagtgtatattctcaccttttatggtcgtagcatatagtgttgtatattgtaaattgtaatttcaaccagaagtaaatttttttcttttgaaggaataaatgttctttatacagcctagttaatgtttaaaaagaaaaaaatagcttggttttatttgtcatctagtctcaagtatagcgagattctttctaaatgttattcaagattgagttctcactagtgtttttttaatcctaaaaaagtaatgttttgattttgtgacagtcaaaaggacgtgcaaaagtctagccttgcccgagctttccttacaatcagagcccctctcaccttgtaaaaaacctgtgtatgcttatgcctgggcaactattttttgtaactcttgtgtagattgtctctaaacaatgtgtgatctttattttgaaaaatacagaactttggaatctg

SEQ ID NO: 42 - DNA, 5185 bp, Homo sapiens
atgttgtcggagtgaaaggtaagggggagcgagagcgccagagagagaagatcggggggctgaaatccatcttcatcctaccgctccgcccgtgttggtggaatgagcgttgcatgtgtcttgaagagaaaagcagtgctttggcaggactctttcagcccccacctgaaacatcaccctcaagaaccagctaatcccaacatgcctgttgttttgacatctggaacagggtcgcaagcgcagccacaaccagctgcaaatcaggctcttgcagctgggactcactccagccctgtcccaggatctataggagttgcaggccgttcccaggacgacgctatggtggactacttctttcagaggcagcatggtgcgttccatggatgaactgaatcatgattttcaagcacttgctctggagggaagagcgatgggagagcagctcttgccaggtaaaaagttttgggaaacagatgaatccagcaaagatggaccaaaaggaatattcctgggtgatcaatggcgagacagtgcctggggaacatcagatcattcagtttcccagccaatcatggtgcagagaagacctggtcagagtttccatgtgaacagtgaggtcaattctgtactgtccccacgatcggagagtgggggactaggcgttagcatggtggagtatgtgttgagctcatccccgggcgattcctgtctaagaaaaggaggatttggcccaagggatgcagacagtgatgaaaacgacaaaggtgaaaagaagaacaagggtacgtttgatggagataagctaggagatttgaaggaggagggtgatgtgatggacaagaccaatggtttaccagtgcagaatgggattgatgcagacgtcaaagattttagccgtacccctggtaattgccagaactctgctaatgaagtggatcttctgggtccaaaccagaatggttctgagggcttagcccagctgaccagcaccaatggtgccaagcctgtggaggatttctccaacatggagtcccagagtgtccccttggaccccatggaacatgtgggcatggagcctcttcagtttgattattcaggcacgcaggtacctgtggactcagcagcagcaactgtgggactttttgactacaattctcaacaacagctgttccaaagacctaatgcgcttgctgtccagcagttgacagctgctcagcagcagcagtatgcactggcagctgctcatcagccgcacatcggcccagctgtggtccctcaccagtattatggagttactccctggggagtctaccctgccagtcttttccagcagcaagctgccgctgccgctgcagcaactaattcagctaatcaacagaccaccccacaggctcagcaaggacagcagcaggttctccgtggaggagccagccaacgtcctttgaccccaaaccagaaccagcagggacagcaaacggatccccttgtggcagctgcagcagtgaattctgcccttgcatttggacaaggtctggcagcaggcatgccaggttatccggtgttggctcctgctgcttactatgaccaaactggtgcccttgtagtgaatgcaggcgcgagaaatggtcttggagctcctgttcgacttgtagctcctgccccagtcatcattagttcctcagctgcacaagcaggaacacagcagcctcagccccagccccagcagcagcccaataacaacctggcatccagttctttctacggcaacaactctctgaacagcaattcacagagcagctccctcttctcccagggctctgcccagcctgccaacacatccttgggattcggaagtagcagttctctcggcgccaccctgggatccgcccttggagggtttggaacagcagttgcaaactccaacactggcagtggctcccgccgtgactccctgactggcagcagtgacctttataagaggacatcgagcagcttgacccccattggacacagtttttataacggccttagcttttcctcctctcctggacccgtgggcatgcctctccctagtcagggaccaggacattcacagacaccacctccttccctctcttcacatggatcctcttcaagcttaaacctgggaggactcacgaatggcagtggaagatacatctctgctgctccaggcgctgaagccaagtaccgcagtgcaagcagcgcctccagcctcttcagcccgagcagcactcttttctcttcctctcgtttgcgatatggaatgtctgatgtcatgccttctggcaggagcaggcttttggaagattttcgaaacaaccggtaccccaatttacaactgcgggagattgctggacatataatggaattttcccaagaccagcatgggtccagattcattcagctgaaactggagcgtgccacaccagctgagcgccagcttgtcttcaatgaaatcctccaggctgcctaccaactcatggtggatgtgtttggtaattacgtcattcagaagttctttgaatttggcagtcttgaacagaagctggctttggcagaacggattcgaggccacgtcctgtcattggcactacagatgtatggctgccgtgttatccagaaagctcttgagtttattccttcagaccagcagaatgagatggttcgggaactagatggccatgtcttgaagtgtgtgaaagatcagaatggcaatcacgtggttcagaaatgcattgaatgtgtacagccccagtctttgcaatttatcatcgatgcgtttaagggacaggtatttgccttatccacacatccttatggctgccgagtgattcagagaatcctggagcactgtctccctgaccagacactccctattttagaggagcttcaccagcacacagagcagcttgtacaggatcaatatggaaattatgtaatccaacatgtactggagcacggtcgtcctgaggataaaagcaaaattgtagcagaaatccgaggcaatgtacttgtattgagtcagcacaaatttgcaagcaatgttgtggagaagtgtgttactcacgcctcacgtacggagcgcgctgtgctcatcgatgaggtgtgcaccatgaacgacggtccccacagtgccttatacaccatgatgaaggaccagtatgccaactacgtggtccagaagatgattgacgtggcggagccaggccagcggaagatcgtcatgcataagatccggccccacatcgcaactcttcgtaagtacacctatggcaagcacattctggccaagctggagaagtactacatgaagaacggtgttgacttagggcccatctgtggcccccctaatggtatcatctgaggcagtgtcacccgctgttccctcattcccgctgacctcactggcccactggcaaatccaaccagcaaccagaaatgttctagtgtagagtctgagacgggcaagtggttgctccaggattactccctcctccaaaaaaggaatcaaatccacgagtggaaaagcctttgtaaatttaattttattacacataacatgtactattttttttaattgactaattgccctgctgttttactggtgtataggatacttgtacataggtaaccaatgtacatgggaggccacatattttgttcactgttgtatctatatttcacatgtggaaactttcagggtggttggtttaacaaaaaaaaaaagctttaaaaaaaaaagaaaaaaaggaaaaggtttttagctcatttgcctggccggcaagttttgcaaatagctcttccccacctcctcattttagtaaaaaacaaacaaaaacaaaaaaacctgagaagtttgaattgtagttaaatgaccccaaactggcatttaacactgtttataaaaaatatatatatatatatatatatataatgaaaaaggtttcagagttgctaaagcttcagtttgtgacattaagtttatgaaattctaaaaaatgccttttttggagactatattatgctgaagaaggctgttcgtgaggaggagatgcgagcacccagaacgtcttttgaggctgggcgggtgtgattgtttactgcctactggatttttttctattaacattgaaaggtaaaatctgattatttagcatgagaaaaaaaaatccaactctgcttttggtcttgcttctataaatatatagtgtatacttggtgtagactttgcatatatacaaatttgtagtattttcttgttttgatgtctaatctgtatctataatgtaccctagtagtcgaacatacttttgattgtacaattgtacatttgtatacctgtaatgtaaatgtggagaagtttgaatcaacataaacacgttttttggtaagaaaagagaattagccagccctgtgcattcagtgtatattctcaccttttatggtcgtagcatatagtgttgtatattgtaaattgtaatttcaaccagaagtaaatttttttcttttgaaggaataaatgttctttatacagcctagttaatgtttaaaaagaaaaaaatagcttggttttatttgtcatctagtctcaagtatagcgagattctttctaaatgttattcaagattgagttctcactagtgtttttttaatcctaaaaaagtaatgttttgattttgtgacagtcaaaaggacgtgcaaaagtctagccttgcccgagctttccttacaatcagagcccctctcaccttgtaaagtgtgaatcgcccttcccttttgtacagaagatgaactgtattttgcattttgtctacttgtaagtgaatgtaacatactgtcaattttccttgtttgaatatagaattgtaacactacacggtgtacatttccagagccttgtgtatatttccaatgaacttttttgcaagcacacttgtaaccatatgtgtataattaacaaacctgtgtatgcttatgcctgggcaactattttttgtaactcttgtgtagattgtctctaaacaatgtgtgatctttattttgaaaaatacagaactttggaatctgaaaaaaaaaaaaaaaaaaaaaaaamaamaaaaasaaaaaacaaaacaaaaacarrmaamaraaamaaacacaaaaraaarammaaaacacaacaaca

SEQ ID NO: 43 - DNA, 5088 bp, Homo sapiens
atgttgtcggagtgaaaggtaagggggagcgagagcgccagagagagaagatcggggggctgaaatccatcttcatcctaccgctccgcccgtgttggtggaatgagcgttgcatgtgtcttgaagagaaaagcagtgctttggcaggactctttcagcccccacctgaaacatcaccctcaagaaccagctaatcccaacatgcctgttgttttgacatctggaacagggtcgcaagcgcagccacaaccagctgcaaatcaggctcttgcagctgggactcactccagccctgtcccaggatctataggagttgcaggccgttcccaggacgacgctatggtggactacttctttcagaggcagcatggtgcgttccatggatgaactgaatcatgattttcaagcacttgctctggagggaagagcgatgggagagcagctcttgccaggtaaaaagttttgggaaacagatgaatccagcaaagatggaccaaaaggaatattcctgggtgatcaatggcgagacagtgcctggggaacatcagatcattcagtttcccagccaatcatggtgcagagaagacctggtcagagtttccatgtgaacagtgaggtcaattctgtactgtccccacgatcggagagtgggggactaggcgttagcatggtggagtatgtgttgagctcatccccgggcgattcctgtctaagaaaaggaggatttggcccaagggatgcagacagtgatgaaaacgacaaaggtgaaaagaagaacaagggtacgtttgatggagataagctaggagatttgaaggaggagggtgatgtgatggacaagaccaatggtttaccagtgcagaatgggattgatgcagacgtcaaagattttagccgtacccctggtaattgccagaactctgctaatgaagtggatcttctgggtccaaaccagaatggttctgagggcttagcccagctgaccagcaccaatggtgccaagcctgtggaggatttctccaacatggagtcccagagtgtccccttggaccccatggaacatgtgggcatggagcctcttcagtttgattattcaggcacgcaggtacctgtggactcagcagcagcaactgtgggactttttgactacaattctcaacaacagctgttccaaagacctaatgcgcttgctgtccagcagttgacagctgctcagcagcagcagtatgcactggcagctgctcatcagccgcacatcggcccagctgtggtccctcaccagtattatggagttactccctggggagtctaccctgccagtcttttccagcagcaagctgccgctgccgctgcagcaactaattcagctaatcaacagaccaccccacaggctcagcaaggacagcagcaggttctccgtggaggagccagccaacgtcctttgaccccaaaccagaaccagcagggacagcaaacggatccccttgtggcagctgcagcagtgaattctgcccttgcatttggacaaggtctggcagcaggcatgccaggttatccggtgttggctcctgctgcttactatgaccaaactggtgcccttgtagtgaatgcaggcgcgagaaatggtcttggagctcctgttcgacttgtagctcctgccccagtcatcattagttcctcagctgcacaagcaggaacacagcagcctcagccccagccccagcagcagcccaataacaacctggcatccagttctttctacggcaacaactctctgaacagcaattcacagagcagctccctcttctcccagggctctgcccagcctgccaacacatccttgggattcggaagtagcagttctctcggcgccaccctgggatccgcccttggagggtttggaacagcagttgcaaactccaacactggcagtggctcccgccgtgactccctgactggcagcagtgacctttataagaggacatcgagcagcttgacccccattggacacagtttttataacggccttagcttttcctcctctcctggacccgtgggcatgcctctccctagtcagggaccaggacattcacagacaccacctccttccctctcttcacatggatcctcttcaagcttaaacctgggaggactcacgaatggcagtggaagatacatctctgctgctccaggcgctgaagccaagtaccgcagtgcaagcagcgcctccagcctcttcagcccgagcagcactcttttctcttcctctcgtttgcgatatggaatgtctgatgtcatgccttctggcaggagcaggcttttggaagattttcgaaacaaccggtaccccaatttacaactgcgggagattgctggacatataatggaattttcccaagaccagcatgggtccagattcattcagctgaaactggagcgtgccacaccagctgagcgccagcttgtcttcaatgaaatcctccaggctgcctaccaactcatggtggatgtgtttggtaattacgtcattcagaagttctttgaatttggcagtcttgaacagaagctggctttggcagaacggattcgaggccacgtcctgtcattggcactacagatgtatggctgccgtgttatccagaaagctcttgagtttattccttcagaccagcagaatgagatggttcgggaactagatggccatgtcttgaagtgtgtgaaagatcagaatggcaatcacgtggttcagaaatgcattgaatgtgtacagccccagtctttgcaatttatcatcgatgcgtttaagggacaggtatttgccttatccacacatccttatggctgccgagtgattcagagaatcctggagcactgtctccctgaccagacactccctattttagaggagcttcaccagcacacagagcagcttgtacaggatcaatatggaaattatgtaatccaacatgtactggagcacggtcgtcctgaggataaaagcaaaattgtagcagaaatccgaggcaatgtacttgtattgagtcagcacaaatttgcaagcaatgttgtggagaagtgtgttactcacgcctcacgtacggagcgcgctgtgctcatcgatgaggtgtgcaccatgaacgacggtccccacagtgccttatacaccatgatgaaggaccagtatgccaactacgtggtccagaagatgattgacgtggcggagccaggccagcggaagatcgtcatgcataagatccggccccacatcgcaactcttcgtaagtacacctatggcaagcacattctggccaagctggagaagtactacatgaagaacggtgttgacttagggcccatctgtggcccccctaatggtatcatctgaggcagtgtcacccgctgttccctcattcccgctgacctcactggcccactggcaaatccaaccagcaaccagaaatgttctagtgtagagtctgagacgggcaagtggttgctccaggattactccctcctccaaaaaaggaatcaaatccacgagtggaaaagcctttgtaaatttaattttattacacataacatgtactattttttttaattgactaattgccctgctgttttactggtgtataggatacttgtacataggtaaccaatgtacatgggaggccacatattttgttcactgttgtatctatatttcacatgtggaaactttcagggtggttggtttaacaaaaaaaaaaagctttaaaaaaaaaagaaaaaaaggaaaaggtttttagctcatttgcctggccggcaagttttgcaaatagctcttccccacctcctcattttagtaaaaaacaaacaaaaacaaaaaaacctgagaagtttgaattgtagttaaatgaccccaaactggcatttaacactgtttataaaaaatatatatatatatatatatatataatgaaaaaggtttcagagttgctaaagcttcagtttgtgacattaagtttatgaaattctaaaaaatgccttttttggagactatattatgctgaagaaggctgttcgtgaggaggagatgcgagcacccagaacgtcttttgaggctgggcgggtgtgattgtttactgcctactggatttttttctattaacattgaaaggtaaaatctgattatttagcatgagaaaaaaaaatccaactctgcttttggtcttgcttctataaatatatagtgtatacttggtgtagactttgcatatatacaaatttgtagtattttcttgttttgatgtctaatctgtatctataatgtaccctagtagtcgaacatacttttgattgtacaattgtacatttgtatacctgtaatgtaaatgtggagaagtttgaatcaacataaacacgttttttggtaagaaaagagaattagccagccctgtgcattcagtgtatattctcaccttttatggtcgtagcatatagtgttgtatattgtaaattgtaatttcaaccagaagtaaatttttttcttttgaaggaataaatgttctttatacagcctagttaatgtttaaaaagaaaaaaatagcttggttttatttgtcatctagtctcaagtatagcgagattctttctaaatgttattcaagattgagttctcactagtgtttttttaatcctaaaaaagtaatgttttgattttgtgacagtcaaaaggacgtgcaaaagtctagccttgcccgagctttccttacaatcagagcccctctcaccttgtaaagtgtgaatcgcccttcccttttgtacagaagatgaactgtattttgcattttgtctacttgtaagtgaatgtaacatactgtcaattttccttgtttgaatatagaattgtaacactacacggtgtacatttccagagccttgtgtatatttccaatgaacttttttgcaagcacacttgtaaccatatgtgtataattaacaaacctgtgtatgcttatgcctgggcaactattttttgtaactcttgtgtagattgtctctaaacaatgtgtgatctttattttgaaaaatacagaactttggaatctg

SEQ ID NO: 44 - DNA, 4886 bp, Homo sapiens
atgttgtcggagtgaaaggtaagggggagcgagagcgccagagagagaagatcggggggctgaaatccatcttcatcctaccgctccgcccgtgttggtggaatgagcgttgcatgtgtcttgaagagaaaagcagtgctttggcaggactctttcagcccccacctgaaacatcaccctcaagaaccagctaatcccaacatgcctgttgttttgacatctggaacagggtcgcaagcgcagccacaaccagctgcaaatcaggctcttgcagctgggactcactccagccctgtcccaggatctataggagttgcaggccgttcccaggacgacgctatggtggactacttctttcagaggcagcatggtgcgttccatggatgaactgaatcatgattttcaagcacttgctctggagggaagagcgatgggagagcagctcttgccaggtaaaaagttttgggaaacagatgaatccagcaaagatggaccaaaaggaatattcctgggtgatcaatggcgagacagtgcctggggaacatcagatcattcagtttcccagccaatcatggtgcagagaagacctggtcagagtttccatgtgaacagtgaggtcaattctgtactgtccccacgatcggagagtgggggactaggcgttagcatggtggagtatgtgttgagctcatccccgggcgattcctgtctaagaaaaggaggatttggcccaagggatgcagacagtgatgaaaacgacaaaggtgaaaagaagaacaagggtacgtttgatggagataagctaggagatttgaaggaggagggtgatgtgatggacaagaccaatggtttaccagtgcagaatgggattgatgcagacgtcaaagattttagccgtacccctggtaattgccagaactctgctaatgaagtggatcttctgggtccaaaccagaatggttctgagggcttagcccagctgaccagcaccaatggtgccaagcctgtggaggatttctccaacatggagtcccagagtgtccccttggaccccatggaacatgtgggcatggagcctcttcagtttgattattcaggcacgcaggtacctgtggactcagcagcagcaactgtgggactttttgactacaattctcaacaacagctgttccaaagacctaatgcgcttgctgtccagcagttgacagctgctcagcagcagcagtatgcactggcagctgctcatcagccgcacatcggcccagctgtggtccctcaccagtattatggagttactccctggggagtctaccctgccagtcttttccagcagcaagctgccgctgccgctgcagcaactaattcagctaatcaacagaccaccccacaggctcagcaaggacagcagcaggttctccgtggaggagccagccaacgtcctttgaccccaaaccagaaccagcagggacagcaaacggatccccttgtggcagctgcagcagtgaattctgcccttgcatttggacaaggtctggcagcaggcatgccaggttatccggtgttggctcctgctgcttactatgaccaaactggtgcccttgtagtgaatgcaggcgcgagaaatggtcttggagctcctgttcgacttgtagctcctgccccagtcatcattagttcctcagctgcacaagcaggaacacagcagcctcagccccagccccagcagcagcccaataacaacctggcatccagttctttctacggcaacaactctctgaacagcaattcacagagcagctccctcttctcccagggctctgcccagcctgccaacacatccttgggattcggaagtagcagttctctcggcgccaccctgggatccgcccttggagggtttggaacagcagttgcaaactccaacactggcagtggctcccgccgtgactccctgactggcagcagtgacctttataagaggacatcgagcagcttgacccccattggacacagtttttataacggccttagcttttcctcctctcctggacccgtgggcatgcctctccctagtcagggaccaggacattcacagacaccacctccttccctctcttcacatggatcctcttcaagcttaaacctgggaggactcacgaatggcagtggaagatacatctctgctgctccaggcgctgaagccaagtaccgcagtgcaagcagcgcctccagcctcttcagcccgagcagcactcttttctcttcctctcgtttgcgatatggaatgtctgatgtcatgccttctggcaggagcaggcttttggaagattttcgaaacaaccggtaccccaatttacaactgcgggagattgctggacatataatggaattttcccaagaccagcatgggtccagattcattcagctgaaactggagcgtgccacaccagctgagcgccagcttgtcttcaatgaaatcctccaggctgcctaccaactcatggtggatgtgtttggtaattacgtcattcagaagttctttgaatttggcagtcttgaacagaagctggctttggcagaacggattcgaggccacgtcctgtcattggcactacagatgtatggctgccgtgttatccagaaagctcttgagtttattccttcagaccagcagaatgagatggttcgggaactagatggccatgtcttgaagtgtgtgaaagatcagaatggcaatcacgtggttcagaaatgcattgaatgtgtacagccccagtctttgcaatttatcatcgatgcgtttaagggacaggtatttgccttatccacacatccttatggctgccgagtgattcagagaatcctggagcactgtctccctgaccagacactccctattttagaggagcttcaccagcacacagagcagcttgtacaggatcaatatggaaattatgtaatccaacatgtactggagcacggtcgtcctgaggataaaagcaaaattgtagcagaaatccgaggcaatgtacttgtattgagtcagcacaaatttgcaagcaatgttgtggagaagtgtgttactcacgcctcacgtacggagcgcgctgtgctcatcgatgaggtgtgcaccatgaacgacggtccccacagtgccttatacaccatgatgaaggaccagtatgccaactacgtggtccagaagatgattgacgtggcggagccaggccagcggaagatcgtcatgcataagatccggccccacatcgcaactcttcgtaagtacacctatggcaagcacattctggccaagctggagaagtactacatgaagaacggtgttgacttagggcccatctgtggcccccctaatggtatcatctgaggcagtgtcacccgctgttccctcattcccgctgacctcactggcccactggcaaatccaaccagcaaccagaaatgttctagtgtagagtctgagacgggcaagtggttgctccaggattactccctcctccaaaaaaggaatcaaatccacgagtggaaaagcctttgtaaatttaattttattacacataacatgtactattttttttaattgactaattgccctgctgttttactggtgtataggatacttgtacataggtaaccaatgtacatgggaggccacatattttgttcactgttgtatctatatttcacatgtggaaactttcagggtggttggtttaacaaaaaaaaaaagctttaaaaaaaaaagaaaaaaaggaaaaggtttttagctcatttgcctggccggcaagttttgcaaatagctcttccccacctcctcattttagtaaaaaacaaacaaaaacaaaaaaacctgagaagtttgaattgtagttaaatgaccccaaactggcatttaacactgtttataaaaaatatatatatatatatatatatataatgaaaaaggtttcagagttgctaaagcttcagtttgtgacattaagtttatgaaattctaaaaaatgccttttttggagactatattatgctgaagaaggctgttcgtgaggaggagatgcgagcacccagaacgtcttttgaggctgggcgggtgtgattgtttactgcctactggatttttttctattaacattgaaaggtaaaatctgattatttagcatgagaaaaaaaaatccaactctgcttttggtcttgcttctataaatatatagtgtatacttggtgtagactttgcatatatacaaatttgtagtattttcttgttttgatgtctaatctgtatctataatgtaccctagtagtcgaacatacttttgattgtacaattgtacatttgtatacctgtaatgtaaatgtggagaagtttgaatcaacataaacacgttttttggtaagaaaagagaattagccagccctgtgcattcagtgtatattctcaccttttatggtcgtagcatatagtgttgtatattgtaaattgtaatttcaaccagaagtaaatttttttcttttgaaggaataaatgttctttatacagcctagttaatgtttaaaaagaaaaaaatagcttggttttatttgtcatctagtctcaagtatagcgagattctttctaaatgttattcaagattgagttctcactagtgtttttttaatcctaaaaaagtaatgttttgattttgtgacagtcaaaaggacgtgcaaaagtctagccttgcccgagctttccttacaatcagagcccctctcaccttgtaaaaaacctgtgtatgcttatgcctgggcaactattttttgtaactcttgtgtagattgtctctaaacaatgtgtgatctttattttgaaaaatacagaactttggaatctg

SEQ ID NO: 45 - DNA, 5984 bp, Homo sapiens
atgttgtcggagtgaaaggtaagggggagcgagagcgccagagagagaagatcggggggctgaaatccatcttcatcctaccgctccgcccgtgttggtggaatgagcgttgcatgtgtcttgaagagaaaagcagtgctttggcaggactctttcagcccccacctgaaacatcaccctcaagaaccagctaatcccaacatgcctgttgttttgacatctggaacagggtcgcaagcgcagccacaaccagctgcaaatcaggctcttgcagctgggactcactccagccctgtcccaggatctataggagttgcaggccgttcccaggacgacgctatggtggactacttctttcagaggcagcatggtgagcagcttgggggaggaggaagtggaggaggcggctataataatagcaaacatcgatggcctactggggataacattcatgcagaacatcagcagagatcacaccattgcactccagcctgagtgacaagagcgaaactctgtctccaaaaaaagaaaaaagaaagattttctctttctttgggatgaagatatgcacagaatttggtgattgaattagaaatcttatatcctggaaagatgaagtaatggaggaaaagtacagagtgcctctggtttgggacacagtgattacatttgataggacacctgttgagtttgaggtagaagcagaatatctgggtgtatgttgtcggagtgaaaggtaagggggagcgagagcgccagagagagaagatcggggggctgaaatccatcttcatcctaccgctccgcccgtgttggtggaatgagcgttgcatgtgtcttgaagagaaaagcagtgctttggcaggactctttcagcccccacctgaaacatcaccctcaagaaccagctaatcccaacatgcctgttgttttgacatctggaacagggtcgcaagcgcagccacaaccagctgcaaatcaggctcttgcagctgggactcactccagccctgtcccaggatctataggagttgcaggccgttcccaggacgacgctatggtggactacttctttcagaggcagcatggtgcgttccatggatgaactgaatcatgattttcaagcacttgctctggagggaagagcgatgggagagcagctcttgccaggtaaaaagttttgggaaacagatgaatccagcaaagatggaccaaaaggaatattcctgggtgatcaatggcgagacagtgcctggggaacatcagatcattcagtttcccagccaatcatggtgcagagaagacctggtcagagtttccatgtgaacagtgaggtcaattctgtactgtccccacgatcggagagtgggggactaggcgttagcatggtggagtatgtgttgagctcatccccgggcgattcctgtctaagaaaaggaggatttggcccaagggatgcagacagtgatgaaaacgacaaaggtgaaaagaagaacaagggtacgtttgatggagataagctaggagatttgaaggaggagggtgatgtgatggacaagaccaatggtttaccagtgcagaatgggattgatgcagacgtcaaagattttagccgtacccctggtaattgccagaactctgctaatgaagtggatcttctgggtccaaaccagaatggttctgagggcttagcccagctgaccagcaccaatggtgccaagcctgtggaggatttctccaacatggagtcccagagtgtccccttggaccccatggaacatgtgggcatggagcctcttcagtttgattattcaggcacgcaggtacctgtggactcagcagcagcaactgtgggactttttgactacaattctcaacaacagctgttccaaagacctaatgcgcttgctgtccagcagttgacagctgctcagcagcagcagtatgcactggcagctgctcatcagccgcacatcggcccagctgtggtccctcaccagtattatggagttactccctggggagtctaccctgccagtcttttccagcagcaagctgccgctgccgctgcagcaactaattcagctaatcaacagaccaccccacaggctcagcaaggacagcagcaggttctccgtggaggagccagccaacgtcctttgaccccaaaccagaaccagcagggacagcaaacggatccccttgtggcagctgcagcagtgaattctgcccttgcatttggacaaggtctggcagcaggcatgccaggttatccggtgttggctcctgctgcttactatgaccaaactggtgcccttgtagtgaatgcaggcgcgagaaatggtcttggagctcctgttcgacttgtagctcctgccccagtcatcattagttcctcagctgcacaagcagctgttgcagcagccgcagcttcagcaaatggagcagctggtggtcttgctggaacaacaaatggaccatttcgccctttaggaacacagcagcctcagccccagccccagcagcagcccaataacaacctggcatccagttctttctacggcaacaactctctgaacagcaattcacagagcagctccctcttctcccagggctctgcccagcctgccaacacatccttgggattcggaagtagcagttctctcggcgccaccctgggatccgcccttggagggtttggaacagcagttgcaaactccaacactggcagtggctcccgccgtgactccctgactggcagcagtgacctttataagaggacatcgagcagcttgacccccattggacacagtttttataacggccttagcttttcctcctctcctggacccgtgggcatgcctctccctagtcagggaccaggacattcacagacaccacctccttccctctcttcacatggatcctcttcaagcttaaacctgggaggactcacgaatggcagtggaagatacatctctgctgctccaggcgctgaagccaagtaccgcagtgcaagcagcgcctccagcctcttcagcccgagcagcactcttttctcttcctctcgtttgcgatatggaatgtctgatgtcatgccttctggcaggagcaggcttttggaagattttcgaaacaaccggtaccccaatttacaactgcgggagattgctggacatataatggaattttcccaagaccagcatgggtccagattcattcagctgaaactggagcgtgccacaccagctgagcgccagcttgtcttcaatgaaatcctccaggctgcctaccaactcatggtggatgtgtttggtaattacgtcattcagaagttctttgaatttggcagtcttgaacagaagctggctttggcagaacggattcgaggccacgtcctgtcattggcactacagatgtatggctgccgtgttatccagaaagctcttgagtttattccttcagaccagcagaatgagatggttcgggaactagatggccatgtcttgaagtgtgtgaaagatcagaatggcaatcacgtggttcagaaatgcattgaatgtgtacagccccagtctttgcaatttatcatcgatgcgtttaagggacaggtatttgccttatccacacatccttatggctgccgagtgattcagagaatcctggagcactgtctccctgaccagacactccctattttagaggagcttcaccagcacacagagcagcttgtacaggatcaatatggaaattatgtaatccaacatgtactggagcacggtcgtcctgaggataaaagcaaaattgtagcagaaatccgaggcaatgtacttgtattgagtcagcacaaatttgcaagcaatgttgtggagaagtgtgttactcacgcctcacgtacggagcgcgctgtgctcatcgatgaggtgtgcaccatgaacgacggtccccacagtgccttatacaccatgatgaaggaccagtatgccaactacgtggtccagaagatgattgacgtggcggagccaggccagcggaagatcgtcatgcataagatccggccccacatcgcaactcttcgtaagtacacctatggcaagcacattctggccaagctggagaagtactacatgaagaacggtgttgacttagggcccatctgtggcccccctaatggtatcatctgaggcagtgtcacccgctgttccctcattcccgctgacctcactggcccactggcaaatccaaccagcaaccagaaatgttctagtgtagagtctgagacgggcaagtggttgctccaggattactccctcctccaaaaaaggaatcaaatccacgagtggaaaagcctttgtaaatttaattttattacacataacatgtactattttttttaattgactaattgccctgctgttttactggtgtataggatacttgtacataggtaaccaatgtacatgggaggccacatattttgttcactgttgtatctatatttcacatgtggaaactttcagggtggttggtttaacaaaaaaaaaaagctttaaaaaaaaaagaaaaaaaggaaaaggtttttagctcatttgcctggccggcaagttttgcaaatagctcttccccacctcctcattttagtaaaaaacaaacaaaaacaaaaaaacctgagaagtttgaattgtagttaaatgaccccaaactggcatttaacactgtttataaaaaatatatatatatatatatatatataatgaaaaaggtttcagagttgctaaagcttcagtttgtgacattaagtttatgaaattctaaaaaatgccttttttggagactatattatgctgaagaaggctgttcgtgaggaggagatgcgagcacccagaacgtcttttgaggctgggcgggtgtgattgtttactgcctactggatttttttctattaacattgaaaggtaaaatctgattatttagcatgagaaaaaaaaatccaactctgcttttggtcttgcttctataaatatatagtgtatacttggtgtagactttgcatatatacaaatttgtagtattttcttgttttgatgtctaatctgtatctataatgtaccctagtagtcgaacatacttttgattgtacaattgtacatttgtatacctgtaatgtaaatgtggagaagtttgaatcaacataaacacgttttttggtaagaaaagagaattagccagccctgtgcattcagtgtatattctcaccttttatggtcgtagcatatagtgttgtatattgtaaattgtaatttcaaccagaagtaaatttttttcttttgaaggaataaatgttctttatacagcctagttaatgtttaaaaagaaaaaaatagcttggttttatttgtcatctagtctcaagtatagcgagattctttctaaatgttattcaagattgagttctcactagtgtttttttaatcctaaaaaagtaatgttttgattttgtgacagtcaaaaggacgtgcaaaagtctagccttgcccgagctttccttacaatcagagcccctctcaccttgtaaagtgtgaatcgcccttcccttttgtacagaagatgaactgtattttgcattttgtctacttgtaagtgaatgtaacatactgtcaattttccttgtttgaatatagaattgtaacactacacggtgtacatttccagagccttgtgtatatttccaatgaacttttttgcaagcacacttgtaaccatatgtgtataattaacaaacctgtgtatgcttatgcctgggcaactattttttgtaactcttgtgtagattgtctctaaacaatgtgtgatctttattttgaaaaatacagaactttggaatctgaaaaaaaaaaaaaaaaaaaaaaaamaamaaaaasaaaaaacaaaacaaaaacarrmaamaraaamaaacacaaaaraaarammaaaacacaacaaca

SEQ ID NO: 46 - DNA, 5366 bp, Homo sapiens
atgttgtcggagtgaaaggtaagggggagcgagagcgccagagagagaagatcggggggctgaaatccatcttcatcctaccgctccgcccgtgttggtggaatgagcgttgcatgtgtcttgaagagaaaagcagtgctttggcaggactctttcagcccccacctgaaacatcaccctcaagaaccagctaatcccaacatgcctgttgttttgacatctggaacagggtcgcaagcgcagccacaaccagctgcaaatcaggctcttgcagctgggactcactccagccctgtcccaggatctataggagttgcaggccgttcccaggacgacgctatggtggactacttctttcagaggcagcatggtgagcagcttgggggaggaggaagtggaggaggcggctataataatagcaaacatcgatggcctactggggataacattcatgcagaacatcaggtgcgttccatggatgaactgaatcatgattttcaagcacttgctctggagggaagagcgatgggagagcagctcttgccaggtaaaaagttttgggaaacagatgaatccagcaaagatggaccaaaaggaatattcctgggtgatcaatggcgagacagtgcctggggaacatcagatcattcagtttcccagccaatcatggtgcagagaagacctggtcagagtttccatgtgaacagtgaggtcaattctgtactgtccccacgatcggagagtgggggactaggcgttagcatggtggagtatgtgttgagctcatccccgggcgattcctgtctaagaaaaggaggatttggcccaagggatgcagacagtgatgaaaacgacaaaggtgaaaagaagaacaagggtacgtttgatggagataagctaggagatttgaaggaggagggtgatgtgatggacaagaccaatggtttaccagtgcagaatgggattgatgcagacgtcaaagattttagccgtacccctggtaattgccagaactctgctaatgaagtggatcttctgggtccaaaccagaatggttctgagggcttagcccagctgaccagcaccaatggtgccaagcctgtggaggatttctccaacatggagtcccagagtgtccccttggaccccatggaacatgtgggcatggagcctcttcagtttgattattcaggcacgcaggtacctgtggactcagcagcagcaactgtgggactttttgactacaattctcaacaacagctgttccaaagacctaatgcgcttgctgtccagcagttgacagctgctcagcagcagcagtatgcactggcagctgctcatcagccgcacatcggtttagctcccgctgcgtttgtccccaatccatacatcatcagcgctgctcccccagggacggacccctacacagctggattggctgcagcagcgacactaggcccagctgtggtccctcaccagtattatggagttactccctggggagtctaccctgccagtcttttccagcagcaagctgccgctgccgctgcagcaactaattcagctaatcaacagaccaccccacaggctcagcaaggacagcagcaggttctccgtggaggagccagccaacgtcctttgaccccaaaccagaaccagcagggacagcaaacggatccccttgtggcagctgcagcagtgaattctgcccttgcatttggacaaggtctggcagcaggcatgccaggttatccggtgttggctcctgctgcttactatgaccaaactggtgcccttgtagtgaatgcaggcgcgagaaatggtcttggagctcctgttcgacttgtagctcctgccccagtcatcattagttcctcagctgcacaagcagctgttgcagcagccgcagcttcagcaaatggagcagctggtggtcttgctggaacaacaaatggaccatttcgccctttaggaacacagcagcctcagccccagccccagcagcagcccaataacaacctggcatccagttctttctacggcaacaactctctgaacagcaattcacagagcagctccctcttctcccagggctctgcccagcctgccaacacatccttgggattcggaagtagcagttctctcggcgccaccctgggatccgcccttggagggtttggaacagcagttgcaaactccaacactggcagtggctcccgccgtgactccctgactggcagcagtgacctttataagaggacatcgagcagcttgacccccattggacacagtttttataacggccttagcttttcctcctctcctggacccgtgggcatgcctctccctagtcagggaccaggacattcacagacaccacctccttccctctcttcacatggatcctcttcaagcttaaacctgggaggactcacgaatggcagtggaagatacatctctgctgctccaggcgctgaagccaagtaccgcagtgcaagcagcgcctccagcctcttcagcccgagcagcactcttttctcttcctctcgtttgcgatatggaatgtctgatgtcatgccttctggcaggagcaggcttttggaagattttcgaaacaaccggtaccccaatttacaactgcgggagattgctggacatataatggaattttcccaagaccagcatgggtccagattcattcagctgaaactggagcgtgccacaccagctgagcgccagcttgtcttcaatgaaatcctccaggctgcctaccaactcatggtggatgtgtttggtaattacgtcattcagaagttctttgaatttggcagtcttgaacagaagctggctttggcagaacggattcgaggccacgtcctgtcattggcactacagatgtatggctgccgtgttatccagaaagctcttgagtttattccttcagaccagcagaatgagatggttcgggaactagatggccatgtcttgaagtgtgtgaaagatcagaatggcaatcacgtggttcagaaatgcattgaatgtgtacagccccagtctttgcaatttatcatcgatgcgtttaagggacaggtatttgccttatccacacatccttatggctgccgagtgattcagagaatcctggagcactgtctccctgaccagacactccctattttagaggagcttcaccagcacacagagcagcttgtacaggatcaatatggaaattatgtaatccaacatgtactggagcacggtcgtcctgaggataaaagcaaaattgtagcagaaatccgaggcaatgtacttgtattgagtcagcacaaatttgcaagcaatgttgtggagaagtgtgttactcacgcctcacgtacggagcgcgctgtgctcatcgatgaggtgtgcaccatgaacgacggtccccacagtgccttatacaccatgatgaaggaccagtatgccaactacgtggtccagaagatgattgacgtggcggagccaggccagcggaagatcgtcatgcataagatccggccccacatcgcaactcttcgtaagtacacctatggcaagcacattctggccaagctggagaagtactacatgaagaacggtgttgacttagggcccatctgtggcccccctaatggtatcatctgaggcagtgtcacccgctgttccctcattcccgctgacctcactggcccactggcaaatccaaccagcaaccagaaatgttctagtgtagagtctgagacgggcaagtggttgctccaggattactccctcctccaaaaaaggaatcaaatccacgagtggaaaagcctttgtaaatttaattttattacacataacatgtactattttttttaattgactaattgccctgctgttttactggtgtataggatacttgtacataggtaaccaatgtacatgggaggccacatattttgttcactgttgtatctatatttcacatgtggaaactttcagggtggttggtttaacaaaaaaaaaaagctttaaaaaaaaaagaaaaaaaggaaaaggtttttagctcatttgcctggccggcaagttttgcaaatagctcttccccacctcctcattttagtaaaaaacaaacaaaaacaaaaaaacctgagaagtttgaattgtagttaaatgaccccaaactggcatttaacactgtttataaaaaatatatatatatatatatatatataatgaaaaaggtttcagagttgctaaagcttcagtttgtgacattaagtttatgaaattctaaaaaatgccttttttggagactatattatgctgaagaaggctgttcgtgaggaggagatgcgagcacccagaacgtcttttgaggctgggcgggtgtgattgtttactgcctactggatttttttctattaacattgaaaggtaaaatctgattatttagcatgagaaaaaaaaatccaactctgcttttggtcttgcttctataaatatatagtgtatacttggtgtagactttgcatatatacaaatttgtagtattttcttgttttgatgtctaatctgtatctataatgtaccctagtagtcgaacatacttttgattgtacaattgtacatttgtatacctgtaatgtaaatgtggagaagtttgaatcaacataaacacgttttttggtaagaaaagagaattagccagccctgtgcattcagtgtatattctcaccttttatggtcgtagcatatagtgttgtatattgtaaattgtaatttcaaccagaagtaaatttttttcttttgaaggaataaatgttctttatacagcctagttaatgtttaaaaagaaaaaaatagcttggttttatttgtcatctagtctcaagtatagcgagattctttctaaatgttattcaagattgagttctcactagtgtttttttaatcctaaaaaagtaatgttttgattttgtgacagtcaaaaggacgtgcaaaagtctagccttgcccgagctttccttacaatcagagcccctctcaccttgtaaagtgtgaatcgcccttcccttttgtacagaagatgaactgtattttgcattttgtctacttgtaagtgaatgtaacatactgtcaattttccttgtttgaatatagaattgtaacactacacggtgtacatttccagagccttgtgtatatttccaatgaacttttttgcaagcacacttgtaaccatatgtgtataattaacaaacctgtgtatgcttatgcctgggcaactattttttgtaactcttgtgtagattgtctctaaacaatgtgtgatctttattttgaaaaatacagaactttggaatctg

SEQ ID NO: 47 - DNA, 5169 bp, Homo sapiens
atgttgtcggagtgaaaggtaagggggagcgagagcgccagagagagaagatcggggggctgaaatccatcttcatcctaccgctccgcccgtgttggtggaatgagcgttgcatgtgtcttgaagagaaaagcagtgctttggcaggactctttcagcccccacctgaaacatcaccctcaagaaccagctaatcccaacatgcctgttgttttgacatctggaacagggtcgcaagcgcagccacaaccagctgcaaatcaggctcttgcagctgggactcactccagccctgtcccaggatctataggagttgcaggccgttcccaggacgacgctatggtggactacttctttcagaggcagcatggtgcgttccatggatgaactgaatcatgattttcaagcacttgctctggagggaagagcgatgggagagcagctcttgccaggtaaaaagttttgggaaacagatgaatccagcaaagatggaccaaaaggaatattcctgggtgatcaatggcgagacagtgcctggggaacatcagatcattcagtttcccagccaatcatggtgcagagaagacctggtcagagtttccatgtgaacagtgaggtcaattctgtactgtccccacgatcggagagtgggggactaggcgttagcatggtggagtatgtgttgagctcatccccgggcgattcctgtctaagaaaaggaggatttggcccaagggatgcagacagtgatgaaaacgacaaaggtgaaaagaagaacaagggtacgtttgatggagataagctaggagatttgaaggaggagggtgatgtgatggacaagaccaatggtttaccagtgcagaatgggattgatgcagacgtcaaagattttagccgtacccctggtaattgccagaactctgctaatgaagtggatcttctgggtccaaaccagaatggttctgagggcttagcccagctgaccagcaccaatggtgccaagcctgtggaggatttctccaacatggagtcccagagtgtccccttggaccccatggaacatgtgggcatggagcctcttcagtttgattattcaggcacgcaggtacctgtggactcagcagcagcaactgtgggactttttgactacaattctcaacaacagctgttccaaagacctaatgcgcttgctgtccagcagttgacagctgctcagcagcagcagtatgcactggcagctgctcatcagccgcacatcggcccagctgtggtccctcaccagtattatggagttactccctggggagtctaccctgccagtcttttccagcagcaagctgccgctgccgctgcagcaactaattcagctaatcaacagaccaccccacaggctcagcaaggacagcagcaggttctccgtggaggagccagccaacgtcctttgaccccaaaccagaaccagcagggacagcaaacggatccccttgtggcagctgcagcagtgaattctgcccttgcatttggacaaggtctggcagcaggcatgccaggttatccggtgttggctcctgctgcttactatgaccaaactggtgcccttgtagtgaatgcaggcgcgagaaatggtcttggagctcctgttcgacttgtagctcctgccccagtcatcattagttcctcagctgcacaagcagctgttgcagcagccgcagcttcagcaaatggagcagctggtggtcttgctggaacaacaaatggaccatttcgccctttaggaacacagcagcctcagccccagccccagcagcagcccaataacaacctggcatccagttctttctacggcaacaactctctgaacagcaattcacagagcagctccctcttctcccagggctctgcccagcctgccaacacatccttgggattcggaagtagcagttctctcggcgccaccctgggatccgcccttggagggtttggaacagcagttgcaaactccaacactggcagtggctcccgccgtgactccctgactggcagcagtgacctttataagaggacatcgagcagcttgacccccattggacacagtttttataacggccttagcttttcctcctctcctggacccgtgggcatgcctctccctagtcagggaccaggacattcacagacaccacctccttccctctcttcacatggatcctcttcaagcttaaacctgggaggactcacgaatggcagtggaagatacatctctgctgctccaggcgctgaagccaagtaccgcagtgcaagcagcgcctccagcctcttcagcccgagcagcactcttttctcttcctctcgtttgcgatatggaatgtctgatgtcatgccttctggcaggagcaggcttttggaagattttcgaaacaaccggtaccccaatttacaactgcgggagattgctggacatataatggaattttcccaagaccagcatgggtccagattcattcagctgaaactggagcgtgccacaccagctgagcgccagcttgtcttcaatgaaatcctccaggctgcctaccaactcatggtggatgtgtttggtaattacgtcattcagaagttctttgaatttggcagtcttgaacagaagctggctttggcagaacggattcgaggccacgtcctgtcattggcactacagatgtatggctgccgtgttatccagaaagctcttgagtttattccttcagaccagcagaatgagatggttcgggaactagatggccatgtcttgaagtgtgtgaaagatcagaatggcaatcacgtggttcagaaatgcattgaatgtgtacagccccagtctttgcaatttatcatcgatgcgtttaagggacaggtatttgccttatccacacatccttatggctgccgagtgattcagagaatcctggagcactgtctccctgaccagacactccctattttagaggagcttcaccagcacacagagcagcttgtacaggatcaatatggaaattatgtaatccaacatgtactggagcacggtcgtcctgaggataaaagcaaaattgtagcagaaatccgaggcaatgtacttgtattgagtcagcacaaatttgcaagcaatgttgtggagaagtgtgttactcacgcctcacgtacggagcgcgctgtgctcatcgatgaggtgtgcaccatgaacgacggtccccacagtgccttatacaccatgatgaaggaccagtatgccaactacgtggtccagaagatgattgacgtggcggagccaggccagcggaagatcgtcatgcataagatccggccccacatcgcaactcttcgtaagtacacctatggcaagcacattctggccaagctggagaagtactacatgaagaacggtgttgacttagggcccatctgtggcccccctaatggtatcatctgaggcagtgtcacccgctgttccctcattcccgctgacctcactggcccactggcaaatccaaccagcaaccagaaatgttctagtgtagagtctgagacgggcaagtggttgctccaggattactccctcctccaaaaaaggaatcaaatccacgagtggaaaagcctttgtaaatttaattttattacacataacatgtactattttttttaattgactaattgccctgctgttttactggtgtataggatacttgtacataggtaaccaatgtacatgggaggccacatattttgttcactgttgtatctatatttcacatgtggaaactttcagggtggttggtttaacaaaaaaaaaaagctttaaaaaaaaaagaaaaaaaggaaaaggtttttagctcatttgcctggccggcaagttttgcaaatagctcttccccacctcctcattttagtaaaaaacaaacaaaaacaaaaaaacctgagaagtttgaattgtagttaaatgaccccaaactggcatttaacactgtttataaaaaatatatatatatatatatatatataatgaaaaaggtttcagagttgctaaagcttcagtttgtgacattaagtttatgaaattctaaaaaatgccttttttggagactatattatgctgaagaaggctgttcgtgaggaggagatgcgagcacccagaacgtcttttgaggctgggcgggtgtgattgtttactgcctactggatttttttctattaacattgaaaggtaaaatctgattatttagcatgagaaaaaaaaatccaactctgcttttggtcttgcttctataaatatatagtgtatacttggtgtagactttgcatatatacaaatttgtagtattttcttgttttgatgtctaatctgtatctataatgtaccctagtagtcgaacatacttttgattgtacaattgtacatttgtatacctgtaatgtaaatgtggagaagtttgaatcaacataaacacgttttttggtaagaaaagagaattagccagccctgtgcattcagtgtatattctcaccttttatggtcgtagcatatagtgttgtatattgtaaattgtaatttcaaccagaagtaaatttttttcttttgaaggaataaatgttctttatacagcctagttaatgtttaaaaagaaaaaaatagcttggttttatttgtcatctagtctcaagtatagcgagattctttctaaatgttattcaagattgagttctcactagtgtttttttaatcctaaaaaagtaatgttttgattttgtgacagtcaaaaggacgtgcaaaagtctagccttgcccgagctttccttacaatcagagcccctctcaccttgtaaagtgtgaatcgcccttcccttttgtacagaagatgaactgtattttgcattttgtctacttgtaagtgaatgtaacatactgtcaattttccttgtttgaatatagaattgtaacactacacggtgtacatttccagagccttgtgtatatttccaatgaacttttttgcaagcacacttgtaaccatatgtgtataattaacaaacctgtgtatgcttatgcctgggcaactattttttgtaactcttgtgtagattgtctctaaacaatgtgtgatctttattttgaaaaatacagaactttggaatctg

SEQ ID NO: 48 - DNA, 5463 bp, Homo sapiens
atgttgtcggagtgaaaggtaagggggagcgagagcgccagagagagaagatcggggggctgaaatccatcttcatcctaccgctccgcccgtgttggtggaatgagcgttgcatgtgtcttgaagagaaaagcagtgctttggcaggactctttcagcccccacctgaaacatcaccctcaagaaccagctaatcccaacatgcctgttgttttgacatctggaacagggtcgcaagcgcagccacaaccagctgcaaatcaggctcttgcagctgggactcactccagccctgtcccaggatctataggagttgcaggccgttcccaggacgacgctatggtggactacttctttcagaggcagcatggtgagcagcttgggggaggaggaagtggaggaggcggctataataatagcaaacatcgatggcctactggggataacattcatgcagaacatcaggtgcgttccatggatgaactgaatcatgattttcaagcacttgctctggagggaagagcgatgggagagcagctcttgccaggtaaaaagttttgggaaacagatgaatccagcaaagatggaccaaaaggaatattcctgggtgatcaatggcgagacagtgcctggggaacatcagatcattcagtttcccagccaatcatggtgcagagaagacctggtcagagtttccatgtgaacagtgaggtcaattctgtactgtccccacgatcggagagtgggggactaggcgttagcatggtggagtatgtgttgagctcatccccgggcgattcctgtctaagaaaaggaggatttggcccaagggatgcagacagtgatgaaaacgacaaaggtgaaaagaagaacaagggtacgtttgatggagataagctaggagatttgaaggaggagggtgatgtgatggacaagaccaatggtttaccagtgcagaatgggattgatgcagacgtcaaagattttagccgtacccctggtaattgccagaactctgctaatgaagtggatcttctgggtccaaaccagaatggttctgagggcttagcccagctgaccagcaccaatggtgccaagcctgtggaggatttctccaacatggagtcccagagtgtccccttggaccccatggaacatgtgggcatggagcctcttcagtttgattattcaggcacgcaggtacctgtggactcagcagcagcaactgtgggactttttgactacaattctcaacaacagctgttccaaagacctaatgcgcttgctgtccagcagttgacagctgctcagcagcagcagtatgcactggcagctgctcatcagccgcacatcggtttagctcccgctgcgtttgtccccaatccatacatcatcagcgctgctcccccagggacggacccctacacagctggattggctgcagcagcgacactaggcccagctgtggtccctcaccagtattatggagttactccctggggagtctaccctgccagtcttttccagcagcaagctgccgctgccgctgcagcaactaattcagctaatcaacagaccaccccacaggctcagcaaggacagcagcaggttctccgtggaggagccagccaacgtcctttgaccccaaaccagaaccagcagggacagcaaacggatccccttgtggcagctgcagcagtgaattctgcccttgcatttggacaaggtctggcagcaggcatgccaggttatccggtgttggctcctgctgcttactatgaccaaactggtgcccttgtagtgaatgcaggcgcgagaaatggtcttggagctcctgttcgacttgtagctcctgccccagtcatcattagttcctcagctgcacaagcagctgttgcagcagccgcagcttcagcaaatggagcagctggtggtcttgctggaacaacaaatggaccatttcgccctttaggaacacagcagcctcagccccagccccagcagcagcccaataacaacctggcatccagttctttctacggcaacaactctctgaacagcaattcacagagcagctccctcttctcccagggctctgcccagcctgccaacacatccttgggattcggaagtagcagttctctcggcgccaccctgggatccgcccttggagggtttggaacagcagttgcaaactccaacactggcagtggctcccgccgtgactccctgactggcagcagtgacctttataagaggacatcgagcagcttgacccccattggacacagtttttataacggccttagcttttcctcctctcctggacccgtgggcatgcctctccctagtcagggaccaggacattcacagacaccacctccttccctctcttcacatggatcctcttcaagcttaaacctgggaggactcacgaatggcagtggaagatacatctctgctgctccaggcgctgaagccaagtaccgcagtgcaagcagcgcctccagcctcttcagcccgagcagcactcttttctcttcctctcgtttgcgatatggaatgtctgatgtcatgccttctggcaggagcaggcttttggaagattttcgaaacaaccggtaccccaatttacaactgcgggagattgctggacatataatggaattttcccaagaccagcatgggtccagattcattcagctgaaactggagcgtgccacaccagctgagcgccagcttgtcttcaatgaaatcctccaggctgcctaccaactcatggtggatgtgtttggtaattacgtcattcagaagttctttgaatttggcagtcttgaacagaagctggctttggcagaacggattcgaggccacgtcctgtcattggcactacagatgtatggctgccgtgttatccagaaagctcttgagtttattccttcagaccagcagaatgagatggttcgggaactagatggccatgtcttgaagtgtgtgaaagatcagaatggcaatcacgtggttcagaaatgcattgaatgtgtacagccccagtctttgcaatttatcatcgatgcgtttaagggacaggtatttgccttatccacacatccttatggctgccgagtgattcagagaatcctggagcactgtctccctgaccagacactccctattttagaggagcttcaccagcacacagagcagcttgtacaggatcaatatggaaattatgtaatccaacatgtactggagcacggtcgtcctgaggataaaagcaaaattgtagcagaaatccgaggcaatgtacttgtattgagtcagcacaaatttgcaagcaatgttgtggagaagtgtgttactcacgcctcacgtacggagcgcgctgtgctcatcgatgaggtgtgcaccatgaacgacggtccccacagtgccttatacaccatgatgaaggaccagtatgccaactacgtggtccagaagatgattgacgtggcggagccaggccagcggaagatcgtcatgcataagatccggccccacatcgcaactcttcgtaagtacacctatggcaagcacattctggccaagctggagaagtactacatgaagaacggtgttgacttagggcccatctgtggcccccctaatggtatcatctgaggcagtgtcacccgctgttccctcattcccgctgacctcactggcccactggcaaatccaaccagcaaccagaaatgttctagtgtagagtctgagacgggcaagtggttgctccaggattactccctcctccaaaaaaggaatcaaatccacgagtggaaaagcctttgtaaatttaattttattacacataacatgtactattttttttaattgactaattgccctgctgttttactggtgtataggatacttgtacataggtaaccaatgtacatgggaggccacatattttgttcactgttgtatctatatttcacatgtggaaactttcagggtggttggtttaacaaaaaaaaaaagctttaaaaaaaaaagaaaaaaaggaaaaggtttttagctcatttgcctggccggcaagttttgcaaatagctcttccccacctcctcattttagtaaaaaacaaacaaaaacaaaaaaacctgagaagtttgaattgtagttaaatgaccccaaactggcatttaacactgtttataaaaaatatatatatatatatatatatataatgaaaaaggtttcagagttgctaaagcttcagtttgtgacattaagtttatgaaattctaaaaaatgccttttttggagactatattatgctgaagaaggctgttcgtgaggaggagatgcgagcacccagaacgtcttttgaggctgggcgggtgtgattgtttactgcctactggatttttttctattaacattgaaaggtaaaatctgattatttagcatgagaaaaaaaaatccaactctgcttttggtcttgcttctataaatatatagtgtatacttggtgtagactttgcatatatacaaatttgtagtattttcttgttttgatgtctaatctgtatctataatgtaccctagtagtcgaacatacttttgattgtacaattgtacatttgtatacctgtaatgtaaatgtggagaagtttgaatcaacataaacacgttttttggtaagaaaagagaattagccagccctgtgcattcagtgtatattctcaccttttatggtcgtagcatatagtgttgtatattgtaaattgtaatttcaaccagaagtaaatttttttcttttgaaggaataaatgttctttatacagcctagttaatgtttaaaaagaaaaaaatagcttggttttatttgtcatctagtctcaagtatagcgagattctttctaaatgttattcaagattgagttctcactagtgtttttttaatcctaaaaaagtaatgttttgattttgtgacagtcaaaaggacgtgcaaaagtctagccttgcccgagctttccttacaatcagagcccctctcaccttgtaaagtgtgaatcgcccttcccttttgtacagaagatgaactgtattttgcattttgtctacttgtaagtgaatgtaacatactgtcaattttccttgtttgaatatagaattgtaacactacacggtgtacatttccagagccttgtgtatatttccaatgaacttttttgcaagcacacttgtaaccatatgtgtataattaacaaacctgtgtatgcttatgcctgggcaactattttttgtaactcttgtgtagattgtctctaaacaatgtgtgatctttattttgaaaaatacagaactttggaatctgaaaaaaaaaaaaaaaaaaaaaaaamaamaaaaasaaaaaacaaaacaaaaacarrmaamaraaamaaacacaaaaraaarammaaaacacaacaaca

SEQ ID NO: 49 - DNA, 4967 bp, Homo sapiens
atgttgtcggagtgaaaggtaagggggagcgagagcgccagagagagaagatcggggggctgaaatccatcttcatcctaccgctccgcccgtgttggtggaatgagcgttgcatgtgtcttgaagagaaaagcagtgctttggcaggactctttcagcccccacctgaaacatcaccctcaagaaccagctaatcccaacatgcctgttgttttgacatctggaacagggtcgcaagcgcagccacaaccagctgcaaatcaggctcttgcagctgggactcactccagccctgtcccaggatctataggagttgcaggccgttcccaggacgacgctatggtggactacttctttcagaggcagcatggtgcgttccatggatgaactgaatcatgattttcaagcacttgctctggagggaagagcgatgggagagcagctcttgccaggtaaaaagttttgggaaacagatgaatccagcaaagatggaccaaaaggaatattcctgggtgatcaatggcgagacagtgcctggggaacatcagatcattcagtttcccagccaatcatggtgcagagaagacctggtcagagtttccatgtgaacagtgaggtcaattctgtactgtccccacgatcggagagtgggggactaggcgttagcatggtggagtatgtgttgagctcatccccgggcgattcctgtctaagaaaaggaggatttggcccaagggatgcagacagtgatgaaaacgacaaaggtgaaaagaagaacaagggtacgtttgatggagataagctaggagatttgaaggaggagggtgatgtgatggacaagaccaatggtttaccagtgcagaatgggattgatgcagacgtcaaagattttagccgtacccctggtaattgccagaactctgctaatgaagtggatcttctgggtccaaaccagaatggttctgagggcttagcccagctgaccagcaccaatggtgccaagcctgtggaggatttctccaacatggagtcccagagtgtccccttggaccccatggaacatgtgggcatggagcctcttcagtttgattattcaggcacgcaggtacctgtggactcagcagcagcaactgtgggactttttgactacaattctcaacaacagctgttccaaagacctaatgcgcttgctgtccagcagttgacagctgctcagcagcagcagtatgcactggcagctgctcatcagccgcacatcggcccagctgtggtccctcaccagtattatggagttactccctggggagtctaccctgccagtcttttccagcagcaagctgccgctgccgctgcagcaactaattcagctaatcaacagaccaccccacaggctcagcaaggacagcagcaggttctccgtggaggagccagccaacgtcctttgaccccaaaccagaaccagcagggacagcaaacggatccccttgtggcagctgcagcagtgaattctgcccttgcatttggacaaggtctggcagcaggcatgccaggttatccggtgttggctcctgctgcttactatgaccaaactggtgcccttgtagtgaatgcaggcgcgagaaatggtcttggagctcctgttcgacttgtagctcctgccccagtcatcattagttcctcagctgcacaagcagctgttgcagcagccgcagcttcagcaaatggagcagctggtggtcttgctggaacaacaaatggaccatttcgccctttaggaacacagcagcctcagccccagccccagcagcagcccaataacaacctggcatccagttctttctacggcaacaactctctgaacagcaattcacagagcagctccctcttctcccagggctctgcccagcctgccaacacatccttgggattcggaagtagcagttctctcggcgccaccctgggatccgcccttggagggtttggaacagcagttgcaaactccaacactggcagtggctcccgccgtgactccctgactggcagcagtgacctttataagaggacatcgagcagcttgacccccattggacacagtttttataacggccttagcttttcctcctctcctggacccgtgggcatgcctctccctagtcagggaccaggacattcacagacaccacctccttccctctcttcacatggatcctcttcaagcttaaacctgggaggactcacgaatggcagtggaagatacatctctgctgctccaggcgctgaagccaagtaccgcagtgcaagcagcgcctccagcctcttcagcccgagcagcactcttttctcttcctctcgtttgcgatatggaatgtctgatgtcatgccttctggcaggagcaggcttttggaagattttcgaaacaaccggtaccccaatttacaactgcgggagattgctggacatataatggaattttcccaagaccagcatgggtccagattcattcagctgaaactggagcgtgccacaccagctgagcgccagcttgtcttcaatgaaatcctccaggctgcctaccaactcatggtggatgtgtttggtaattacgtcattcagaagttctttgaatttggcagtcttgaacagaagctggctttggcagaacggattcgaggccacgtcctgtcattggcactacagatgtatggctgccgtgttatccagaaagctcttgagtttattccttcagaccagcagaatgagatggttcgggaactagatggccatgtcttgaagtgtgtgaaagatcagaatggcaatcacgtggttcagaaatgcattgaatgtgtacagccccagtctttgcaatttatcatcgatgcgtttaagggacaggtatttgccttatccacacatccttatggctgccgagtgattcagagaatcctggagcactgtctccctgaccagacactccctattttagaggagcttcaccagcacacagagcagcttgtacaggatcaatatggaaattatgtaatccaacatgtactggagcacggtcgtcctgaggataaaagcaaaattgtagcagaaatccgaggcaatgtacttgtattgagtcagcacaaatttgcaagcaatgttgtggagaagtgtgttactcacgcctcacgtacggagcgcgctgtgctcatcgatgaggtgtgcaccatgaacgacggtccccacagtgccttatacaccatgatgaaggaccagtatgccaactacgtggtccagaagatgattgacgtggcggagccaggccagcggaagatcgtcatgcataagatccggccccacatcgcaactcttcgtaagtacacctatggcaagcacattctggccaagctggagaagtactacatgaagaacggtgttgacttagggcccatctgtggcccccctaatggtatcatctgaggcagtgtcacccgctgttccctcattcccgctgacctcactggcccactggcaaatccaaccagcaaccagaaatgttctagtgtagagtctgagacgggcaagtggttgctccaggattactccctcctccaaaaaaggaatcaaatccacgagtggaaaagcctttgtaaatttaattttattacacataacatgtactattttttttaattgactaattgccctgctgttttactggtgtataggatacttgtacataggtaaccaatgtacatgggaggccacatattttgttcactgttgtatctatatttcacatgtggaaactttcagggtggttggtttaacaaaaaaaaaaagctttaaaaaaaaaagaaaaaaaggaaaaggtttttagctcatttgcctggccggcaagttttgcaaatagctcttccccacctcctcattttagtaaaaaacaaacaaaaacaaaaaaacctgagaagtttgaattgtagttaaatgaccccaaactggcatttaacactgtttataaaaaatatatatatatatatatatatataatgaaaaaggtttcagagttgctaaagcttcagtttgtgacattaagtttatgaaattctaaaaaatgccttttttggagactatattatgctgaagaaggctgttcgtgaggaggagatgcgagcacccagaacgtcttttgaggctgggcgggtgtgattgtttactgcctactggatttttttctattaacattgaaaggtaaaatctgattatttagcatgagaaaaaaaaatccaactctgcttttggtcttgcttctataaatatatagtgtatacttggtgtagactttgcatatatacaaatttgtagtattttcttgttttgatgtctaatctgtatctataatgtaccctagtagtcgaacatacttttgattgtacaattgtacatttgtatacctgtaatgtaaatgtggagaagtttgaatcaacataaacacgttttttggtaagaaaagagaattagccagccctgtgcattcagtgtatattctcaccttttatggtcgtagcatatagtgttgtatattgtaaattgtaatttcaaccagaagtaaatttttttcttttgaaggaataaatgttctttatacagcctagttaatgtttaaaaagaaaaaaatagcttggttttatttgtcatctagtctcaagtatagcgagattctttctaaatgttattcaagattgagttctcactagtgtttttttaatcctaaaaaagtaatgttttgattttgtgacagtcaaaaggacgtgcaaaagtctagccttgcccgagctttccttacaatcagagcccctctcaccttgtaaaaaacctgtgtatgcttatgcctgggcaactattttttgtaactcttgtgtagattgtctctaaacaatgtgtgatctttattttgaaaaatacagaactttggaatctg

SEQ ID NO: 50 - DNA, 3219 bp, Homo sapiens
gcggccgcggagcaagaagggcgccgcggcgtgcggcccgcgcagcccccggagccatgggcaagtgcagcgggcgctgcacgctggtcgccttctgctgcctgcagctggtggctgcgctggagcggcagatctttgacttcctgggctaccagtgggctcccatcctagccaacttcctgcacatcatggcagtcatcctgggcatctttggcaccgtgcagtaccgctcccggtacctcatcctgtatgcagcctggctggtgctctgggttggctggaatgcatttatcatctgcttctacttggaggttggacagctgtcccaggaccgggacttcatcatgaccttcaacacatccctgcaccgctcctggtggatggagaatgggccaggctgcctggtgacacctgttctgaactcccgcctggctctggaggaccaccatgtcatctctgtcactggctgcctgcttgactacccctacattgaagccctcagcagcgccctgcagatcttcctggcactgttcggcttcgtgttcgcctgctacgtgagcaaagtgttcctggaggaggaggacagctttgacttcatcggcggctttgactcctacggataccaggcgccccagaagacgtcgcatttacagctgcagcctctgtacacgtcggggtagcctctgccccgcgcccaccccggcgcctcgccctgggctgaccgcagctgccgcgagctcgggccaaggcgcaggcgtgtccccctggtggcccgcgctctcactgcagcctgtgcccaaccccgcgtctgcatctggagatgcggacttggacgtggacttggacttggacttggatttgagcttggctcttcgcagcccggacttcggaggagtggggcggggcgggggaggggcaccacgggttttttgttttttgtttgtttgtttttaatctcagccttggcgtgagctggggccttcctctcttctccagcctctccctttcactcttcacccagcatcctgcccccctgtccaaaaacagcaggacatcagacccatcccatcccaccacactcactcaccagctctggggaaagctactgtgaactaggagcaggattcctgggttctaatcgcaggtccatcactgactgtgacgtctagcaaagcccttgccctctctgagcctcggtttccgcacctcaagtaattaatcccttagcaaatggactctttcagacttctcatttaactcaattccctgagctagactgggattaaaattctcattttgcagtacattaaaactgaggcccagagatgtgatttgcttgaggccacacagctagatttttggtggaagtgggccttgaacacagtgtactttctgcagtttctgactgtaaaacccagtgtctgctctctgagttccatttccaagcccccctccatcttggacctatgtggtctccaccatattcacacaccaccgccaccacttgccaatgcctctcttaaagcaatatacccattcgttctcttattgggaactggatggatgaagccccaaattcagccccacccacagagaagccttcctacactcagcctctgtccacccttggcaaatctttcaagctctctcctccaggaaagtggggccccaactcagtcactccacccccttccaggtccctgaggctggttctactgtatccccatcacctccacaactccactcacccctgacggctccatccacctcaccagttggaaggcttgtggtttcagagaggagcaatgctggtcagcgctgcccagactccagtgtttacagatcaccagcatttacaaccaatccaatggccagaagcctcctctaacaagcccagaaggagttctgaaggggcagatgggggtgtgagtagtcggggagtcgggattgccagcaccctcacccttccttgggggcaagtagaggtgagaacactttccccacctccctccacagacactcctgaggacgctgcatcccacgcactgcctggtgcgtccatagagagaggatcaggtctcagcatttcatctgtgaaagaggcatggccctgggttagaaaggagggcaggagacatggaggaactggggggcacccagatggtgcagatggtttgcacacctgagcctgtctgtggtgaccattccgctcctctcccactaccctccaatctatcattccctactctctaaggccaaaatatcctgagcaaggctggcaaccccaccccaccatcccaaatgcaagcagccaggcccaggagttcctctggcccccacaggcatggagctcccagctggtgggtacagcttgagaggggggcagctccctcaggctaagctactgcccttcactgggccagccctgcctccagccctcacctctctcaccccaactctcccccaagcccctttctactcaacgggtgtagccactggtgctttgaagccttttgtttttataagatggtttttgcaaggggaccaggttctcttttcactgggaccttgcaaggaggggagtgctctcctggtttctgtgcaggcgggttgattaaagatggtgttttcttctctatcttcctgtcctgcccattgggtctatagaactttctaagtgagaagtccctgcatgagggcaggcaggaatgatttgatgttgatgttatcaaatattcctggggtggccaggcacggtggctcatgcctgtaatcccaacacttttgaaggctgaggtgggcagatcacgcgaggtcaggagtttgagaccagcctggccaacatgatgaaaccctgtctctactaaaaatacaaaaattaggcagggccgggaggctgaggaaggagaatcacttgaacttgggatgcagaggtggagtgagctcagatggcgccactctaccccagcctgggtgatagagcaagactccatctcaaaacaataaaaaagaaacaaatcctggggcactggcctgtaactctgactgggtgtgtagctttaggcaactcactctccctctctatactcatccaaaaaaaaaaaaaaaaaaaagcagaggtcaaacaaaatcagtgggttcccaaatgtggcttcataatcccttagagatcttcctacttattttcctgataaaatgcattttaagtttatgctttca

SEQ ID NO: 51 - DNA, 5093 bp, Homo sapiens
atgttgtcggagtgaaaggtaagggggagcgagagcgccagagagagaagatcggggggctgaaatccatcttcatcctaccgctccgcccgtgttggtggaatgagcgttgcatgtgtcttgaagagaaaagcagtgctttggcaggactctttcagcccccacctgaaacatcaccctcaagaaccagctaatcccaacatgcctgttgttttgacatctggaacagggtcgcaagcgcagccacaaccagctgcaaatcaggctcttgcagctgggactcactccagccctgtcccaggatctataggagttgcaggccgttcccaggacgacgctatggtggactacttctttcagaggcagcatggtgagcagcttgggggaggaggaagtggaggaggcggctataataatagcaaacatcgatggcctactggggataacattcatgcagaacatcaggtgcgttccatggatgaactgaatcatgattttcaagcacttgctctggagggaagagcgatgggagagcagctcttgccaggtaaaaagttttgggaaacagatgaatccagcaaagatggaccaaaaggaatattcctgggtgatcaatggcgagacagtgcctggggaacatcagatcattcagtttcccagccaatcatggtgcagagaagacctggtcagagtttccatgtgaacagtgaggtcaattctgtactgtccccacgatcggagagtgggggactaggcgttagcatggtggagtatgtgttgagctcatccccgggcgattcctgtctaagaaaaggaggatttctgttccaaagacctaatgcgcttgctgtccagcagttgacagctgctcagcagcagcagtatgcactggcagctgctcatcagccgcacatcggtttagctcccgctgcgtttgtccccaatccatacatcatcagcgctgctcccccagggacggacccctacacagctggattggctgcagcagcgacactaggcccagctgtggtccctcaccagtattatggagttactccctggggagtctaccctgccagtcttttccagcagcaagctgccgctgccgctgcagcaactaattcagctaatcaacagaccaccccacaggctcagcaaggacagcagcaggttctccgtggaggagccagccaacgtcctttgaccccaaaccagaaccagcagggacagcaaacggatccccttgtggcagctgcagcagtgaattctgcccttgcatttggacaaggtctggcagcaggcatgccaggttatccggtgttggctcctgctgcttactatgaccaaactggtgcccttgtagtgaatgcaggcgcgagaaatggtcttggagctcctgttcgacttgtagctcctgccccagtcatcattagttcctcagctgcacaagcaggtgagcgcacatctgagtggactcctgccagagatctaaaagtggcgactgatagtgagattcttaaactgttgcagcagccgcagcttcagcaaatggagcagctggtggtcttgctggaacaacaaatggaccatttcgccctttaggaacacagcagcctcagccccagccccagcagcagcccaataacaacctggcatccagttctttctacggcaacaactctctgaacagcaattcacagagcagctccctcttctcccagggctctgcccagcctgccaacacatccttgggattcggaagtagcagttctctcggcgccaccctgggatccgcccttggagggtttggaacagcagttgcaaactccaacactggcagtggctcccgccgtgactccctgactggcagcagtgacctttataagaggacatcgagcagcttgacccccattggacacagtttttataacggccttagcttttcctcctctcctggacccgtgggcatgcctctccctagtcagggaccaggacattcacagacaccacctccttccctctcttcacatggatcctcttcaagcttaaacctgggaggactcacgaatggcagtggaagatacatctctgctgctccaggcgctgaagccaagtaccgcagtgcaagcagcgcctccagcctcttcagcccgagcagcactcttttctcttcctctcgtttgcgatatggaatgtctgatgtcatgccttctggcaggagcaggcttttggaagattttcgaaacaaccggtaccccaatttacaactgcgggagattgctggacatataatggaattttcccaagaccagcatgggtccagattcattcagctgaaactggagcgtgccacaccagctgagcgccagcttgtcttcaatgaaatcctccaggctgcctaccaactcatggtggatgtgtttggtaattacgtcattcagaagttctttgaatttggcagtcttgaacagaagctggctttggcagaacggattcgaggccacgtcctgtcattggcactacagatgtatggctgccgtgttatccagaaagctcttgagtttattccttcagaccagcagaatgagatggttcgggaactagatggccatgtcttgaagtgtgtgaaagatcagaatggcaatcacgtggttcagaaatgcattgaatgtgtacagccccagtctttgcaatttatcatcgatgcgtttaagggacaggtatttgccttatccacacatccttatggctgccgagtgattcagagaatcctggagcactgtctccctgaccagacactccctattttagaggagcttcaccagcacacagagcagcttgtacaggatcaatatggaaattatgtaatccaacatgtactggagcacggtcgtcctgaggataaaagcaaaattgtagcagaaatccgaggcaatgtacttgtattgagtcagcacaaatttgcaagcaatgttgtggagaagtgtgttactcacgcctcacgtacggagcgcgctgtgctcatcgatgaggtgtgcaccatgaacgacggtccccacagtgccttatacaccatgatgaaggaccagtatgccaactacgtggtccagaagatgattgacgtggcggagccaggccagcggaagatcgtcatgcataagatccggccccacatcgcaactcttcgtaagtacacctatggcaagcacattctggccaagctggagaagtactacatgaagaacggtgttgacttagggcccatctgtggcccccctaatggtatcatctgaggcagtgtcacccgctgttccctcattcccgctgacctcactggcccactggcaaatccaaccagcaaccagaaatgttctagtgtagagtctgagacgggcaagtggttgctccaggattactccctcctccaaaaaaggaatcaaatccacgagtggaaaagcctttgtaaatttaattttattacacataacatgtactattttttttaattgactaattgccctgctgttttactggtgtataggatacttgtacataggtaaccaatgtacatgggaggccacatattttgttcactgttgtatctatatttcacatgtggaaactttcagggtggttggtttaacaaaaaaaaaaagctttaaaaaaaaaagaaaaaaaggaaaaggtttttagctcatttgcctggccggcaagttttgcaaatagctcttccccacctcctcattttagtaaaaaacaaacaaaaacaaaaaaacctgagaagtttgaattgtagttaaatgaccccaaactggcatttaacactgtttataaaaaatatatatatatatatatatatataatgaaaaaggtttcagagttgctaaagcttcagtttgtgacattaagtttatgaaattctaaaaaatgccttttttggagactatattatgctgaagaaggctgttcgtgaggaggagatgcgagcacccagaacgtcttttgaggctgggcgggtgtgattgtttactgcctactggatttttttctattaacattgaaaggtaaaatctgattatttagcatgagaaaaaaaaatccaactctgcttttggtcttgcttctataaatatatagtgtatacttggtgtagactttgcatatatacaaatttgtagtattttcttgttttgatgtctaatctgtatctataatgtaccctagtagtcgaacatacttttgattgtacaattgtacatttgtatacctgtaatgtaaatgtggagaagtttgaatcaacataaacacgttttttggtaagaaaagagaattagccagccctgtgcattcagtgtatattctcaccttttatggtcgtagcatatagtgttgtatattgtaaattgtaatttcaaccagaagtaaatttttttcttttgaaggaataaatgttctttatacagcctagttaatgtttaaaaagaaaaaaatagcttggttttatttgtcatctagtctcaagtatagcgagattctttctaaatgttattcaagattgagttctcactagtgtttttttaatcctaaaaaagtaatgttttgattttgtgacagtcaaaaggacgtgcaaaagtctagccttgcccgagctttccttacaatcagagcccctctcaccttgtaaagtgtgaatcgcccttcccttttgtacagaagatgaactgtattttgcattttgtctacttgtaagtgaatgtaacatactgtcaattttccttgtttgaatatagaattgtaacactacacggtgtacatttccagagccttgtgtatatttccaatgaacttttttgcaagcacacttgtaaccatatgtgtataattaacaaacctgtgtatgcttatgcctgggcaactattttttgtaactcttgtgtagattgtctctaaacaatgtgtgatctttattttgaaaaatacagaactttggaatctgaaaaaaaaaaaaaaaaaaaaaaaamaamaaaaasaaaaaacaaaacaaaaacarrmaamaraaamaaacacaaaaraaarammaaaacacaacaaca

SEQ ID NO: 52 - DNA, 3129 bp, Homo sapiens
gcggccgcggagcaagaagggcgccgcggcgtgcggcccgcgcagcccccggagccatgggcaagtgcagcgggcgctgcacgctggtcgccttctgctgcctgcagctgtggaagatacatctctgctgctccaggcgctgaagccaagtaccgcagtgcaagcagcgcctccagcctcttcagcccgagcagcactcttttctcttcctctcgtttgcgatatggaatgtctgatgtcatgccttctggcaggagcaggcttttggaagattttcgaaacaaccggtaccccaatttacaactgcgggagattgctggacatataatggaattttcccaagaccagcatgggtccagattcattcagctgaaactggagcgtgccacaccagctgagcgccagcttgtcttcaatgaaatcctccaggctgcctaccaactcatggtggatgtgtttggtaattacgtcattcagaagttctttgaatttggcagtcttgaacagaagctggctttggcagaacggattcgaggccacgtcctgtcattggcactacagatgtatggctgccgtgttatccagaaagctcttgagtttattccttcagaccagcagaatgagatggttcgggaactagatggccatgtcttgaagtgtgtgaaagatcagaatggcaatcacgtggttcagaaatgcattgaatgtgtacagccccagtctttgcaatttatcatcgatgcgtttaagggacaggtatttgccttatccacacatccttatggctgccgagtgattcagagaatcctggagcactgtctccctgaccagacactccctattttagaggagcttcaccagcacacagagcagcttgtacaggatcaatatggaaattatgtaatccaacatgtactggagcacggtcgtcctgaggataaaagcaaaattgtagcagaaatccgaggcaatgtacttgtattgagtcagcacaaatttgcaagcaatgttgtggagaagtgtgttactcacgcctcacgtacggagcgcgctgtgctcatcgatgaggtgtgcaccatgaacgacggtccccacagtgccttatacaccatgatgaaggaccagtatgccaactacgtggtccagaagatgattgacgtggcggagccaggccagcggaagatcgtcatgcataagatccggccccacatcgcaactcttcgtaagtacacctatggcaagcacattctggccaagctggagaagtactacatgaagaacggtgttgacttagggcccatctgtggcccccctaatggtatcatctgaggcagtgtcacccgctgttccctcattcccgctgacctcactggcccactggcaaatccaaccagcaaccagaaatgttctagtgtagagtctgagacgggcaagtggttgctccaggattactccctcctccaaaaaaggaatcaaatccacgagtggaaaagcctttgtaaatttaattttattacacataacatgtactattttttttaattgactaattgccctgctgttttactggtgtataggatacttgtacataggtaaccaatgtacatgggaggccacatattttgttcactgttgtatctatatttcacatgtggaaactttcagggtggttggtttaacaaaaaaaaaaagctttaaaaaaaaaagaaaaaaaggaaaaggtttttagctcatttgcctggccggcaagttttgcaaatagctcttccccacctcctcattttagtaaaaaacaaacaaaaacaaaaaaacctgagaagtttgaattgtagttaaatgaccccaaactggcatttaacactgtttataaaaaatatatatatatatatatatatataatgaaaaaggtttcagagttgctaaagcttcagtttgtgacattaagtttatgaaattctaaaaaatgccttttttggagactatattatgctgaagaaggctgttcgtgaggaggagatgcgagcacccagaacgtcttttgaggctgggcgggtgtgattgtttactgcctactggatttttttctattaacattgaaaggtaaaatctgattatttagcatgagaaaaaaaaatccaactctgcttttggtcttgcttctataaatatatagtgtatacttggtgtagactttgcatatatacaaatttgtagtattttcttgttttgatgtctaatctgtatctataatgtaccctagtagtcgaacatacttttgattgtacaattgtacatttgtatacctgtaatgtaaatgtggagaagtttgaatcaacataaacacgttttttggtaagaaaagagaattagccagccctgtgcattcagtgtatattctcaccttttatggtcgtagcatatagtgttgtatattgtaaattgtaatttcaaccagaagtaaatttttttcttttgaaggaataaatgttctttatacagcctagttaatgtttaaaaagaaaaaaatagcttggttttatttgtcatctagtctcaagtatagcgagattctttctaaatgttattcaagattgagttctcactagtgtttttttaatcctaaaaaagtaatgttttgattttgtgacagtcaaaaggacgtgcaaaagtctagccttgcccgagctttccttacaatcagagcccctctcaccttgtaaagtgtgaatcgcccttcccttttgtacagaagatgaactgtattttgcattttgtctacttgtaagtgaatgtaacatactgtcaattttccttgtttgaatatagaattgtaacactacacggtgtacatttccagagccttgtgtatatttccaatgaacttttttgcaagcacacttgtaaccatatgtgtataattaacaaacctgtgtatgcttatgcctgggcaactattttttgtaactcttgtgtagattgtctctaaacaatgtgtgatctttattttgaaaaatacagaactttggaatctgaaaaaaaaaaaaaaaaaaaaaaaamaamaaaaasaaaaaacaaaacaaaaacarrmaamaraaamaaacacaaaaraaarammaaaacacaacaaca

SEQ ID NO: 53 - DNA, 4996 bp, Homo sapiens
atgttgtcggagtgaaaggtaagggggagcgagagcgccagagagagaagatcggggggctgaaatccatcttcatcctaccgctccgcccgtgttggtggaatgagcgttgcatgtgtcttgaagagaaaagcagtgctttggcaggactctttcagcccccacctgaaacatcaccctcaagaaccagctaatcccaacatgcctgttgttttgacatctggaacagggtcgcaagcgcagccacaaccagctgcaaatcaggctcttgcagctgggactcactccagccctgtcccaggatctataggagttgcaggccgttcccaggacgacgctatggtggactacttctttcagaggcagcatggtgagcagcttgggggaggaggaagtggaggaggcggctataataatagcaaacatcgatggcctactggggataacattcatgcagaacatcaggtgcgttccatggatgaactgaatcatgattttcaagcacttgctctggagggaagagcgatgggagagcagctcttgccaggtaaaaagttttgggaaacagatgaatccagcaaagatggaccaaaaggaatattcctgggtgatcaatggcgagacagtgcctggggaacatcagatcattcagtttcccagccaatcatggtgcagagaagacctggtcagagtttccatgtgaacagtgaggtcaattctgtactgtccccacgatcggagagtgggggactaggcgttagcatggtggagtatgtgttgagctcatccccgggcgattcctgtctaagaaaaggaggatttctgttccaaagacctaatgcgcttgctgtccagcagttgacagctgctcagcagcagcagtatgcactggcagctgctcatcagccgcacatcggtttagctcccgctgcgtttgtccccaatccatacatcatcagcgctgctcccccagggacggacccctacacagctggattggctgcagcagcgacactaggcccagctgtggtccctcaccagtattatggagttactccctggggagtctaccctgccagtcttttccagcagcaagctgccgctgccgctgcagcaactaattcagctaatcaacagaccaccccacaggctcagcaaggacagcagcaggttctccgtggaggagccagccaacgtcctttgaccccaaaccagaaccagcagggacagcaaacggatccccttgtggcagctgcagcagtgaattctgcccttgcatttggacaaggtctggcagcaggcatgccaggttatccggtgttggctcctgctgcttactatgaccaaactggtgcccttgtagtgaatgcaggcgcgagaaatggtcttggagctcctgttcgacttgtagctcctgccccagtcatcattagttcctcagctgcacaagcaggtgagcgcacatctgagtggactcctgccagagatctaaaagtggcgactgatagtgagattcttaaactgttgcagcagccgcagcttcagcaaatggagcagctggtggtcttgctggaacaacaaatggaccatttcgccctttaggaacacagcagcctcagccccagccccagcagcagcccaataacaacctggcatccagttctttctacggcaacaactctctgaacagcaattcacagagcagctccctcttctcccagggctctgcccagcctgccaacacatccttgggattcggaagtagcagttctctcggcgccaccctgggatccgcccttggagggtttggaacagcagttgcaaactccaacactggcagtggctcccgccgtgactccctgactggcagcagtgacctttataagaggacatcgagcagcttgacccccattggacacagtttttataacggccttagcttttcctcctctcctggacccgtgggcatgcctctccctagtcagggaccaggacattcacagacaccacctccttccctctcttcacatggatcctcttcaagcttaaacctgggaggactcacgaatggcagtggaagatacatctctgctgctccaggcgctgaagccaagtaccgcagtgcaagcagcgcctccagcctcttcagcccgagcagcactcttttctcttcctctcgtttgcgatatggaatgtctgatgtcatgccttctggcaggagcaggcttttggaagattttcgaaacaaccggtaccccaatttacaactgcgggagattgctggacatataatggaattttcccaagaccagcatgggtccagattcattcagctgaaactggagcgtgccacaccagctgagcgccagcttgtcttcaatgaaatcctccaggctgcctaccaactcatggtggatgtgtttggtaattacgtcattcagaagttctttgaatttggcagtcttgaacagaagctggctttggcagaacggattcgaggccacgtcctgtcattggcactacagatgtatggctgccgtgttatccagaaagctcttgagtttattccttcagaccagcagaatgagatggttcgggaactagatggccatgtcttgaagtgtgtgaaagatcagaatggcaatcacgtggttcagaaatgcattgaatgtgtacagccccagtctttgcaatttatcatcgatgcgtttaagggacaggtatttgccttatccacacatccttatggctgccgagtgattcagagaatcctggagcactgtctccctgaccagacactccctattttagaggagcttcaccagcacacagagcagcttgtacaggatcaatatggaaattatgtaatccaacatgtactggagcacggtcgtcctgaggataaaagcaaaattgtagcagaaatccgaggcaatgtacttgtattgagtcagcacaaatttgcaagcaatgttgtggagaagtgtgttactcacgcctcacgtacggagcgcgctgtgctcatcgatgaggtgtgcaccatgaacgacggtccccacagtgccttatacaccatgatgaaggaccagtatgccaactacgtggtccagaagatgattgacgtggcggagccaggccagcggaagatcgtcatgcataagatccggccccacatcgcaactcttcgtaagtacacctatggcaagcacattctggccaagctggagaagtactacatgaagaacggtgttgacttagggcccatctgtggcccccctaatggtatcatctgaggcagtgtcacccgctgttccctcattcccgctgacctcactggcccactggcaaatccaaccagcaaccagaaatgttctagtgtagagtctgagacgggcaagtggttgctccaggattactccctcctccaaaaaaggaatcaaatccacgagtggaaaagcctttgtaaatttaattttattacacataacatgtactattttttttaattgactaattgccctgctgttttactggtgtataggatacttgtacataggtaaccaatgtacatgggaggccacatattttgttcactgttgtatctatatttcacatgtggaaactttcagggtggttggtttaacaaaaaaaaaaagctttaaaaaaaaaagaaaaaaaggaaaaggtttttagctcatttgcctggccggcaagttttgcaaatagctcttccccacctcctcattttagtaaaaaacaaacaaaaacaaaaaaacctgagaagtttgaattgtagttaaatgaccccaaactggcatttaacactgtttataaaaaatatatatatatatatatatatataatgaaaaaggtttcagagttgctaaagcttcagtttgtgacattaagtttatgaaattctaaaaaatgccttttttggagactatattatgctgaagaaggctgttcgtgaggaggagatgcgagcacccagaacgtcttttgaggctgggcgggtgtgattgtttactgcctactggatttttttctattaacattgaaaggtaaaatctgattatttagcatgagaaaaaaaaatccaactctgcttttggtcttgcttctataaatatatagtgtatacttggtgtagactttgcatatatacaaatttgtagtattttcttgttttgatgtctaatctgtatctataatgtaccctagtagtcgaacatacttttgattgtacaattgtacatttgtatacctgtaatgtaaatgtggagaagtttgaatcaacataaacacgttttttggtaagaaaagagaattagccagccctgtgcattcagtgtatattctcaccttttatggtcgtagcatatagtgttgtatattgtaaattgtaatttcaaccagaagtaaatttttttcttttgaaggaataaatgttctttatacagcctagttaatgtttaaaaagaaaaaaatagcttggttttatttgtcatctagtctcaagtatagcgagattctttctaaatgttattcaagattgagttctcactagtgtttttttaatcctaaaaaagtaatgttttgattttgtgacagtcaaaaggacgtgcaaaagtctagccttgcccgagctttccttacaatcagagcccctctcaccttgtaaagtgtgaatcgcccttcccttttgtacagaagatgaactgtattttgcattttgtctacttgtaagtgaatgtaacatactgtcaattttccttgtttgaatatagaattgtaacactacacggtgtacatttccagagccttgtgtatatttccaatgaacttttttgcaagcacacttgtaaccatatgtgtataattaacaaacctgtgtatgcttatgcctgggcaactattttttgtaactcttgtgtagattgtctctaaacaatgtgtgatctttattttgaaaaatacagaactttggaatctg

SEQ ID NO: 54 - DNA, 3032 bp, Homo sapiens
gcggccgcggagcaagaagggcgccgcggcgtgcggcccgcgcagcccccggagccatgggcaagtgcagcgggcgctgcacgctggtcgccttctgctgcctgcagctgtggaagatacatctctgctgctccaggcgctgaagccaagtaccgcagtgcaagcagcgcctccagcctcttcagcccgagcagcactcttttctcttcctctcgtttgcgatatggaatgtctgatgtcatgccttctggcaggagcaggcttttggaagattttcgaaacaaccggtaccccaatttacaactgcgggagattgctggacatataatggaattttcccaagaccagcatgggtccagattcattcagctgaaactggagcgtgccacaccagctgagcgccagcttgtcttcaatgaaatcctccaggctgcctaccaactcatggtggatgtgtttggtaattacgtcattcagaagttctttgaatttggcagtcttgaacagaagctggctttggcagaacggattcgaggccacgtcctgtcattggcactacagatgtatggctgccgtgttatccagaaagctcttgagtttattccttcagaccagcagaatgagatggttcgggaactagatggccatgtcttgaagtgtgtgaaagatcagaatggcaatcacgtggttcagaaatgcattgaatgtgtacagccccagtctttgcaatttatcatcgatgcgtttaagggacaggtatttgccttatccacacatccttatggctgccgagtgattcagagaatcctggagcactgtctccctgaccagacactccctattttagaggagcttcaccagcacacagagcagcttgtacaggatcaatatggaaattatgtaatccaacatgtactggagcacggtcgtcctgaggataaaagcaaaattgtagcagaaatccgaggcaatgtacttgtattgagtcagcacaaatttgcaagcaatgttgtggagaagtgtgttactcacgcctcacgtacggagcgcgctgtgctcatcgatgaggtgtgcaccatgaacgacggtccccacagtgccttatacaccatgatgaaggaccagtatgccaactacgtggtccagaagatgattgacgtggcggagccaggccagcggaagatcgtcatgcataagatccggccccacatcgcaactcttcgtaagtacacctatggcaagcacattctggccaagctggagaagtactacatgaagaacggtgttgacttagggcccatctgtggcccccctaatggtatcatctgaggcagtgtcacccgctgttccctcattcccgctgacctcactggcccactggcaaatccaaccagcaaccagaaatgttctagtgtagagtctgagacgggcaagtggttgctccaggattactccctcctccaaaaaaggaatcaaatccacgagtggaaaagcctttgtaaatttaattttattacacataacatgtactattttttttaattgactaattgccctgctgttttactggtgtataggatacttgtacataggtaaccaatgtacatgggaggccacatattttgttcactgttgtatctatatttcacatgtggaaactttcagggtggttggtttaacaaaaaaaaaaagctttaaaaaaaaaagaaaaaaaggaaaaggtttttagctcatttgcctggccggcaagttttgcaaatagctcttccccacctcctcattttagtaaaaaacaaacaaaaacaaaaaaacctgagaagtttgaattgtagttaaatgaccccaaactggcatttaacactgtttataaaaaatatatatatatatatatatatataatgaaaaaggtttcagagttgctaaagcttcagtttgtgacattaagtttatgaaattctaaaaaatgccttttttggagactatattatgctgaagaaggctgttcgtgaggaggagatgcgagcacccagaacgtcttttgaggctgggcgggtgtgattgtttactgcctactggatttttttctattaacattgaaaggtaaaatctgattatttagcatgagaaaaaaaaatccaactctgcttttggtcttgcttctataaatatatagtgtatacttggtgtagactttgcatatatacaaatttgtagtattttcttgttttgatgtctaatctgtatctataatgtaccctagtagtcgaacatacttttgattgtacaattgtacatttgtatacctgtaatgtaaatgtggagaagtttgaatcaacataaacacgttttttggtaagaaaagagaattagccagccctgtgcattcagtgtatattctcaccttttatggtcgtagcatatagtgttgtatattgtaaattgtaatttcaaccagaagtaaatttttttcttttgaaggaataaatgttctttatacagcctagttaatgtttaaaaagaaaaaaatagcttggttttatttgtcatctagtctcaagtatagcgagattctttctaaatgttattcaagattgagttctcactagtgtttttttaatcctaaaaaagtaatgttttgattttgtgacagtcaaaaggacgtgcaaaagtctagccttgcccgagctttccttacaatcagagcccctctcaccttgtaaagtgtgaatcgcccttcccttttgtacagaagatgaactgtattttgcattttgtctacttgtaagtgaatgtaacatactgtcaattttccttgtttgaatatagaattgtaacactacacggtgtacatttccagagccttgtgtatatttccaatgaacttttttgcaagcacacttgtaaccatatgtgtataattaacaaacctgtgtatgcttatgcctgggcaactattttttgtaactcttgtgtagattgtctctaaacaatgtgtgatctttattttgaaaaatacagaactttggaatctg

SEQ ID NO: 55 - DNA, 4794 bp, Homo sapiens
atgttgtcggagtgaaaggtaagggggagcgagagcgccagagagagaagatcggggggctgaaatccatcttcatcctaccgctccgcccgtgttggtggaatgagcgttgcatgtgtcttgaagagaaaagcagtgctttggcaggactctttcagcccccacctgaaacatcaccctcaagaaccagctaatcccaacatgcctgttgttttgacatctggaacagggtcgcaagcgcagccacaaccagctgcaaatcaggctcttgcagctgggactcactccagccctgtcccaggatctataggagttgcaggccgttcccaggacgacgctatggtggactacttctttcagaggcagcatggtgagcagcttgggggaggaggaagtggaggaggcggctataataatagcaaacatcgatggcctactggggataacattcatgcagaacatcaggtgcgttccatggatgaactgaatcatgattttcaagcacttgctctggagggaagagcgatgggagagcagctcttgccaggtaaaaagttttgggaaacagatgaatccagcaaagatggaccaaaaggaatattcctgggtgatcaatggcgagacagtgcctggggaacatcagatcattcagtttcccagccaatcatggtgcagagaagacctggtcagagtttccatgtgaacagtgaggtcaattctgtactgtccccacgatcggagagtgggggactaggcgttagcatggtggagtatgtgttgagctcatccccgggcgattcctgtctaagaaaaggaggatttctgttccaaagacctaatgcgcttgctgtccagcagttgacagctgctcagcagcagcagtatgcactggcagctgctcatcagccgcacatcggtttagctcccgctgcgtttgtccccaatccatacatcatcagcgctgctcccccagggacggacccctacacagctggattggctgcagcagcgacactaggcccagctgtggtccctcaccagtattatggagttactccctggggagtctaccctgccagtcttttccagcagcaagctgccgctgccgctgcagcaactaattcagctaatcaacagaccaccccacaggctcagcaaggacagcagcaggttctccgtggaggagccagccaacgtcctttgaccccaaaccagaaccagcagggacagcaaacggatccccttgtggcagctgcagcagtgaattctgcccttgcatttggacaaggtctggcagcaggcatgccaggttatccggtgttggctcctgctgcttactatgaccaaactggtgcccttgtagtgaatgcaggcgcgagaaatggtcttggagctcctgttcgacttgtagctcctgccccagtcatcattagttcctcagctgcacaagcaggtgagcgcacatctgagtggactcctgccagagatctaaaagtggcgactgatagtgagattcttaaactgttgcagcagccgcagcttcagcaaatggagcagctggtggtcttgctggaacaacaaatggaccatttcgccctttaggaacacagcagcctcagccccagccccagcagcagcccaataacaacctggcatccagttctttctacggcaacaactctctgaacagcaattcacagagcagctccctcttctcccagggctctgcccagcctgccaacacatccttgggattcggaagtagcagttctctcggcgccaccctgggatccgcccttggagggtttggaacagcagttgcaaactccaacactggcagtggctcccgccgtgactccctgactggcagcagtgacctttataagaggacatcgagcagcttgacccccattggacacagtttttataacggccttagcttttcctcctctcctggacccgtgggcatgcctctccctagtcagggaccaggacattcacagacaccacctccttccctctcttcacatggatcctcttcaagcttaaacctgggaggactcacgaatggcagtggaagatacatctctgctgctccaggcgctgaagccaagtaccgcagtgcaagcagcgcctccagcctcttcagcccgagcagcactcttttctcttcctctcgtttgcgatatggaatgtctgatgtcatgccttctggcaggagcaggcttttggaagattttcgaaacaaccggtaccccaatttacaactgcgggagattgctggacatataatggaattttcccaagaccagcatgggtccagattcattcagctgaaactggagcgtgccacaccagctgagcgccagcttgtcttcaatgaaatcctccaggctgcctaccaactcatggtggatgtgtttggtaattacgtcattcagaagttctttgaatttggcagtcttgaacagaagctggctttggcagaacggattcgaggccacgtcctgtcattggcactacagatgtatggctgccgtgttatccagaaagctcttgagtttattccttcagaccagcagaatgagatggttcgggaactagatggccatgtcttgaagtgtgtgaaagatcagaatggcaatcacgtggttcagaaatgcattgaatgtgtacagccccagtctttgcaatttatcatcgatgcgtttaagggacaggtatttgccttatccacacatccttatggctgccgagtgattcagagaatcctggagcactgtctccctgaccagacactccctattttagaggagcttcaccagcacacagagcagcttgtacaggatcaatatggaaattatgtaatccaacatgtactggagcacggtcgtcctgaggataaaagcaaaattgtagcagaaatccgaggcaatgtacttgtattgagtcagcacaaatttgcaagcaatgttgtggagaagtgtgttactcacgcctcacgtacggagcgcgctgtgctcatcgatgaggtgtgcaccatgaacgacggtccccacagtgccttatacaccatgatgaaggaccagtatgccaactacgtggtccagaagatgattgacgtggcggagccaggccagcggaagatcgtcatgcataagatccggccccacatcgcaactcttcgtaagtacacctatggcaagcacattctggccaagctggagaagtactacatgaagaacggtgttgacttagggcccatctgtggcccccctaatggtatcatctgaggcagtgtcacccgctgttccctcattcccgctgacctcactggcccactggcaaatccaaccagcaaccagaaatgttctagtgtagagtctgagacgggcaagtggttgctccaggattactccctcctccaaaaaaggaatcaaatccacgagtggaaaagcctttgtaaatttaattttattacacataacatgtactattttttttaattgactaattgccctgctgttttactggtgtataggatacttgtacataggtaaccaatgtacatgggaggccacatattttgttcactgttgtatctatatttcacatgtggaaactttcagggtggttggtttaacaaaaaaaaaaagctttaaaaaaaaaagaaaaaaaggaaaaggtttttagctcatttgcctggccggcaagttttgcaaatagctcttccccacctcctcattttagtaaaaaacaaacaaaaacaaaaaaacctgagaagtttgaattgtagttaaatgaccccaaactggcatttaacactgtttataaaaaatatatatatatatatatatatataatgaaaaaggtttcagagttgctaaagcttcagtttgtgacattaagtttatgaaattctaaaaaatgccttttttggagactatattatgctgaagaaggctgttcgtgaggaggagatgcgagcacccagaacgtcttttgaggctgggcgggtgtgattgtttactgcctactggatttttttctattaacattgaaaggtaaaatctgattatttagcatgagaaaaaaaaatccaactctgcttttggtcttgcttctataaatatatagtgtatacttggtgtagactttgcatatatacaaatttgtagtattttcttgttttgatgtctaatctgtatctataatgtaccctagtagtcgaacatacttttgattgtacaattgtacatttgtatacctgtaatgtaaatgtggagaagtttgaatcaacataaacacgttttttggtaagaaaagagaattagccagccctgtgcattcagtgtatattctcaccttttatggtcgtagcatatagtgttgtatattgtaaattgtaatttcaaccagaagtaaatttttttcttttgaaggaataaatgttctttatacagcctagttaatgtttaaaaagaaaaaaatagcttggttttatttgtcatctagtctcaagtatagcgagattctttctaaatgttattcaagattgagttctcactagtgtttttttaatcctaaaaaagtaatgttttgattttgtgacagtcaaaaggacgtgcaaaagtctagccttgcccgagctttccttacaatcagagcccctctcaccttgtaaaaaacctgtgtatgcttatgcctgggcaactattttttgtaactcttgtgtagattgtctctaaacaatgtgtgatctttattttgaaaaatacagaactttggaatctg

SEQ ID NO: 56 - DNA, 2830 bp, Homo sapiens
gcggccgcggagcaagaagggcgccgcggcgtgcggcccgcgcagcccccggagccatgggcaagtgcagcgggcgctgcacgctggtcgccttctgctgcctgcagctgtggaagatacatctctgctgctccaggcgctgaagccaagtaccgcagtgcaagcagcgcctccagcctcttcagcccgagcagcactcttttctcttcctctcgtttgcgatatggaatgtctgatgtcatgccttctggcaggagcaggcttttggaagattttcgaaacaaccggtaccccaatttacaactgcgggagattgctggacatataatggaattttcccaagaccagcatgggtccagattcattcagctgaaactggagcgtgccacaccagctgagcgccagcttgtcttcaatgaaatcctccaggctgcctaccaactcatggtggatgtgtttggtaattacgtcattcagaagttctttgaatttggcagtcttgaacagaagctggctttggcagaacggattcgaggccacgtcctgtcattggcactacagatgtatggctgccgtgttatccagaaagctcttgagtttattccttcagaccagcagaatgagatggttcgggaactagatggccatgtcttgaagtgtgtgaaagatcagaatggcaatcacgtggttcagaaatgcattgaatgtgtacagccccagtctttgcaatttatcatcgatgcgtttaagggacaggtatttgccttatccacacatccttatggctgccgagtgattcagagaatcctggagcactgtctccctgaccagacactccctattttagaggagcttcaccagcacacagagcagcttgtacaggatcaatatggaaattatgtaatccaacatgtactggagcacggtcgtcctgaggataaaagcaaaattgtagcagaaatccgaggcaatgtacttgtattgagtcagcacaaatttgcaagcaatgttgtggagaagtgtgttactcacgcctcacgtacggagcgcgctgtgctcatcgatgaggtgtgcaccatgaacgacggtccccacagtgccttatacaccatgatgaaggaccagtatgccaactacgtggtccagaagatgattgacgtggcggagccaggccagcggaagatcgtcatgcataagatccggccccacatcgcaactcttcgtaagtacacctatggcaagcacattctggccaagctggagaagtactacatgaagaacggtgttgacttagggcccatctgtggcccccctaatggtatcatctgaggcagtgtcacccgctgttccctcattcccgctgacctcactggcccactggcaaatccaaccagcaaccagaaatgttctagtgtagagtctgagacgggcaagtggttgctccaggattactccctcctccaaaaaaggaatcaaatccacgagtggaaaagcctttgtaaatttaattttattacacataacatgtactattttttttaattgactaattgccctgctgttttactggtgtataggatacttgtacataggtaaccaatgtacatgggaggccacatattttgttcactgttgtatctatatttcacatgtggaaactttcagggtggttggtttaacaaaaaaaaaaagctttaaaaaaaaaagaaaaaaaggaaaaggtttttagctcatttgcctggccggcaagttttgcaaatagctcttccccacctcctcattttagtaaaaaacaaacaaaaacaaaaaaacctgagaagtttgaattgtagttaaatgaccccaaactggcatttaacactgtttataaaaaatatatatatatatatatatatataatgaaaaaggtttcagagttgctaaagcttcagtttgtgacattaagtttatgaaattctaaaaaatgccttttttggagactatattatgctgaagaaggctgttcgtgaggaggagatgcgagcacccagaacgtcttttgaggctgggcgggtgtgattgtttactgcctactggatttttttctattaacattgaaaggtaaaatctgattatttagcatgagaaaaaaaaatccaactctgcttttggtcttgcttctataaatatatagtgtatacttggtgtagactttgcatatatacaaatttgtagtattttcttgttttgatgtctaatctgtatctataatgtaccctagtagtcgaacatacttttgattgtacaattgtacatttgtatacctgtaatgtaaatgtggagaagtttgaatcaacataaacacgttttttggtaagaaaagagaattagccagccctgtgcattcagtgtatattctcaccttttatggtcgtagcatatagtgttgtatattgtaaattgtaatttcaaccagaagtaaatttttttcttttgaaggaataaatgttctttatacagcctagttaatgtttaaaaagaaaaaaatagcttggttttatttgtcatctagtctcaagtatagcgagattctttctaaatgttattcaagattgagttctcactagtgtttttttaatcctaaaaaagtaatgttttgattttgtgacagtcaaaaggacgtgcaaaagtctagccttgcccgagctttccttacaatcagagcccctctcaccttgtaaaaaacctgtgtatgcttatgcctgggcaactattttttgtaactcttgtgtagattgtctctaaacaatgtgtgatctttattttgaaaaatacagaactttggaatctg

SEQ ID NO: 57 - DNA, 3675 bp, Homo sapiens
aagataggcagcattaaaagattttttgaaaaaagataaaaatgtagtttggaaatgtggccagtccctttcatagccaaacggtttgctttcttcttcatagctgttgcagcagccgcagcttcagcaaatggagcagctggtggtcttgctggaacaacaaatggaccatttcgccctttaggaacacagcagcctcagccccagccccagcagcagcccaataacaacctggcatccagttctttctacggcaacaactctctgaacagcaattcacagagcagctccctcttctcccagggctctgcccagcctgccaacacatccttgggattcggaagtagcagttctctcggcgccaccctgggatccgcccttggagggtttggaacagcagttgcaaactccaacactggcagtggctcccgccgtgactccctgactggcagcagtgacctttataagaggacatcgagcagcttgacccccattggacacagtttttataacggccttagcttttcctcctctcctggacccgtgggcatgcctctccctagtcagggaccaggacattcacagacaccacctccttccctctcttcacatggatcctcttcaagcttaaacctgggaggactcacgaatggcagtggaagatacatctctgctgctccaggcgctgaagccaagtaccgcagtgcaagcagcgcctccagcctcttcagcccgagcagcactcttttctcttcctctcgtttgcgatatggaatgtctgatgtcatgccttctggcaggagcaggcttttggaagattttcgaaacaaccggtaccccaatttacaactgcgggagattgctggacatataatggaattttcccaagaccagcatgggtccagattcattcagctgaaactggagcgtgccacaccagctgagcgccagcttgtcttcaatgaaatcctccaggctgcctaccaactcatggtggatgtgtttggtaattacgtcattcagaagttctttgaatttggcagtcttgaacagaagctggctttggcagaacggattcgaggccacgtcctgtcattggcactacagatgtatggctgccgtgttatccagaaagctcttgagtttattccttcagaccagcagaatgagatggttcgggaactagatggccatgtcttgaagtgtgtgaaagatcagaatggcaatcacgtggttcagaaatgcattgaatgtgtacagccccagtctttgcaatttatcatcgatgcgtttaagggacaggtatttgccttatccacacatccttatggctgccgagtgattcagagaatcctggagcactgtctccctgaccagacactccctattttagaggagcttcaccagcacacagagcagcttgtacaggatcaatatggaaattatgtaatccaacatgtactggagcacggtcgtcctgaggataaaagcaaaattgtagcagaaatccgaggcaatgtacttgtattgagtcagcacaaatttgcaagcaatgttgtggagaagtgtgttactcacgcctcacgtacggagcgcgctgtgctcatcgatgaggtgtgcaccatgaacgacggtccccacagtgccttatacaccatgatgaaggaccagtatgccaactacgtggtccagaagatgattgacgtggcggagccaggccagcggaagatcgtcatgcataagatccggccccacatcgcaactcttcgtaagtacacctatggcaagcacattctggccaagctggagaagtactacatgaagaacggtgttgacttagggcccatctgtggcccccctaatggtatcatctgaggcagtgtcacccgctgttccctcattcccgctgacctcactggcccactggcaaatccaaccagcaaccagaaatgttctagtgtagagtctgagacgggcaagtggttgctccaggattactccctcctccaaaaaaggaatcaaatccacgagtggaaaagcctttgtaaatttaattttattacacataacatgtactattttttttaattgactaattgccctgctgttttactggtgtataggatacttgtacataggtaaccaatgtacatgggaggccacatattttgttcactgttgtatctatatttcacatgtggaaactttcagggtggttggtttaacaaaaaaaaaaagctttaaaaaaaaaagaaaaaaaggaaaaggtttttagctcatttgcctggccggcaagttttgcaaatagctcttccccacctcctcattttagtaaaaaacaaacaaaaacaaaaaaacctgagaagtttgaattgtagttaaatgaccccaaactggcatttaacactgtttataaaaaatatatatatatatatatatatataatgaaaaaggtttcagagttgctaaagcttcagtttgtgacattaagtttatgaaattctaaaaaatgccttttttggagactatattatgctgaagaaggctgttcgtgaggaggagatgcgagcacccagaacgtcttttgaggctgggcgggtgtgattgtttactgcctactggatttttttctattaacattgaaaggtaaaatctgattatttagcatgagaaaaaaaaatccaactctgcttttggtcttgcttctataaatatatagtgtatacttggtgtagactttgcatatatacaaatttgtagtattttcttgttttgatgtctaatctgtatctataatgtaccctagtagtcgaacatacttttgattgtacaattgtacatttgtatacctgtaatgtaaatgtggagaagtttgaatcaacataaacacgttttttggtaagaaaagagaattagccagccctgtgcattcagtgtatattctcaccttttatggtcgtagcatatagtgttgtatattgtaaattgtaatttcaaccagaagtaaatttttttcttttgaaggaataaatgttctttatacagcctagttaatgtttaaaaagaaaaaaatagcttggttttatttgtcatctagtctcaagtatagcgagattctttctaaatgttattcaagattgagttctcactagtgtttttttaatcctaaaaaagtaatgttttgattttgtgacagtcaaaaggacgtgcaaaagtctagccttgcccgagctttccttacaatcagagcccctctcaccttgtaaagtgtgaatcgcccttcccttttgtacagaagatgaactgtattttgcattttgtctacttgtaagtgaatgtaacatactgtcaattttccttgtttgaatatagaattgtaacactacacggtgtacatttccagagccttgtgtatatttccaatgaacttttttgcaagcacacttgtaaccatatgtgtataattaacaaacctgtgtatgcttatgcctgggcaactattttttgtaactcttgtgtagattgtctctaaacaatgtgtgatctttattttgaaaaatacagaactttggaatctgaaaaaaaaaaaaaaaaaaaaaaaamaamaaaaasaaaaaacaaaacaaaaacarrmaamaraaamaaacacaaaaraaarammaaaacacaacaaca

SEQ ID NO: 58 - DNA, 3578 bp, Homo sapiens
aagataggcagcattaaaagattttttgaaaaaagataaaaatgtagtttggaaatgtggccagtccctttcatagccaaacggtttgctttcttcttcatagctgttgcagcagccgcagcttcagcaaatggagcagctggtggtcttgctggaacaacaaatggaccatttcgccctttaggaacacagcagcctcagccccagccccagcagcagcccaataacaacctggcatccagttctttctacggcaacaactctctgaacagcaattcacagagcagctccctcttctcccagggctctgcccagcctgccaacacatccttgggattcggaagtagcagttctctcggcgccaccctgggatccgcccttggagggtttggaacagcagttgcaaactccaacactggcagtggctcccgccgtgactccctgactggcagcagtgacctttataagaggacatcgagcagcttgacccccattggacacagtttttataacggccttagcttttcctcctctcctggacccgtgggcatgcctctccctagtcagggaccaggacattcacagacaccacctccttccctctcttcacatggatcctcttcaagcttaaacctgggaggactcacgaatggcagtggaagatacatctctgctgctccaggcgctgaagccaagtaccgcagtgcaagcagcgcctccagcctcttcagcccgagcagcactcttttctcttcctctcgtttgcgatatggaatgtctgatgtcatgccttctggcaggagcaggcttttggaagattttcgaaacaaccggtaccccaatttacaactgcgggagattgctggacatataatggaattttcccaagaccagcatgggtccagattcattcagctgaaactggagcgtgccacaccagctgagcgccagcttgtcttcaatgaaatcctccaggctgcctaccaactcatggtggatgtgtttggtaattacgtcattcagaagttctttgaatttggcagtcttgaacagaagctggctttggcagaacggattcgaggccacgtcctgtcattggcactacagatgtatggctgccgtgttatccagaaagctcttgagtttattccttcagaccagcagaatgagatggttcgggaactagatggccatgtcttgaagtgtgtgaaagatcagaatggcaatcacgtggttcagaaatgcattgaatgtgtacagccccagtctttgcaatttatcatcgatgcgtttaagggacaggtatttgccttatccacacatccttatggctgccgagtgattcagagaatcctggagcactgtctccctgaccagacactccctattttagaggagcttcaccagcacacagagcagcttgtacaggatcaatatggaaattatgtaatccaacatgtactggagcacggtcgtcctgaggataaaagcaaaattgtagcagaaatccgaggcaatgtacttgtattgagtcagcacaaatttgcaagcaatgttgtggagaagtgtgttactcacgcctcacgtacggagcgcgctgtgctcatcgatgaggtgtgcaccatgaacgacggtccccacagtgccttatacaccatgatgaaggaccagtatgccaactacgtggtccagaagatgattgacgtggcggagccaggccagcggaagatcgtcatgcataagatccggccccacatcgcaactcttcgtaagtacacctatggcaagcacattctggccaagctggagaagtactacatgaagaacggtgttgacttagggcccatctgtggcccccctaatggtatcatctgaggcagtgtcacccgctgttccctcattcccgctgacctcactggcccactggcaaatccaaccagcaaccagaaatgttctagtgtagagtctgagacgggcaagtggttgctccaggattactccctcctccaaaaaaggaatcaaatccacgagtggaaaagcctttgtaaatttaattttattacacataacatgtactattttttttaattgactaattgccctgctgttttactggtgtataggatacttgtacataggtaaccaatgtacatgggaggccacatattttgttcactgttgtatctatatttcacatgtggaaactttcagggtggttggtttaacaaaaaaaaaaagctttaaaaaaaaaagaaaaaaaggaaaaggtttttagctcatttgcctggccggcaagttttgcaaatagctcttccccacctcctcattttagtaaaaaacaaacaaaaacaaaaaaacctgagaagtttgaattgtagttaaatgaccccaaactggcatttaacactgtttataaaaaatatatatatatatatatatatataatgaaaaaggtttcagagttgctaaagcttcagtttgtgacattaagtttatgaaattctaaaaaatgccttttttggagactatattatgctgaagaaggctgttcgtgaggaggagatgcgagcacccagaacgtcttttgaggctgggcgggtgtgattgtttactgcctactggatttttttctattaacattgaaaggtaaaatctgattatttagcatgagaaaaaaaaatccaactctgcttttggtcttgcttctataaatatatagtgtatacttggtgtagactttgcatatatacaaatttgtagtattttcttgttttgatgtctaatctgtatctataatgtaccctagtagtcgaacatacttttgattgtacaattgtacatttgtatacctgtaatgtaaatgtggagaagtttgaatcaacataaacacgttttttggtaagaaaagagaattagccagccctgtgcattcagtgtatattctcaccttttatggtcgtagcatatagtgttgtatattgtaaattgtaatttcaaccagaagtaaatttttttcttttgaaggaataaatgttctttatacagcctagttaatgtttaaaaagaaaaaaatagcttggttttatttgtcatctagtctcaagtatagcgagattctttctaaatgttattcaagattgagttctcactagtgtttttttaatcctaaaaaagtaatgttttgattttgtgacagtcaaaaggacgtgcaaaagtctagccttgcccgagctttccttacaatcagagcccctctcaccttgtaaagtgtgaatcgcccttcccttttgtacagaagatgaactgtattttgcattttgtctacttgtaagtgaatgtaacatactgtcaattttccttgtttgaatatagaattgtaacactacacggtgtacatttccagagccttgtgtatatttccaatgaacttttttgcaagcacacttgtaaccatatgtgtataattaacaaacctgtgtatgcttatgcctgggcaactattttttgtaactcttgtgtagattgtctctaaacaatgtgtgatctttattttgaaaaatacagaactttggaatctg

SEQ ID NO: 59 - DNA, 3376 bp, Homo sapiens
aagataggcagcattaaaagattttttgaaaaaagataaaaatgtagtttggaaatgtggccagtccctttcatagccaaacggtttgctttcttcttcatagctgttgcagcagccgcagcttcagcaaatggagcagctggtggtcttgctggaacaacaaatggaccatttcgccctttaggaacacagcagcctcagccccagccccagcagcagcccaataacaacctggcatccagttctttctacggcaacaactctctgaacagcaattcacagagcagctccctcttctcccagggctctgcccagcctgccaacacatccttgggattcggaagtagcagttctctcggcgccaccctgggatccgcccttggagggtttggaacagcagttgcaaactccaacactggcagtggctcccgccgtgactccctgactggcagcagtgacctttataagaggacatcgagcagcttgacccccattggacacagtttttataacggccttagcttttcctcctctcctggacccgtgggcatgcctctccctagtcagggaccaggacattcacagacaccacctccttccctctcttcacatggatcctcttcaagcttaaacctgggaggactcacgaatggcagtggaagatacatctctgctgctccaggcgctgaagccaagtaccgcagtgcaagcagcgcctccagcctcttcagcccgagcagcactcttttctcttcctctcgtttgcgatatggaatgtctgatgtcatgccttctggcaggagcaggcttttggaagattttcgaaacaaccggtaccccaatttacaactgcgggagattgctggacatataatggaattttcccaagaccagcatgggtccagattcattcagctgaaactggagcgtgccacaccagctgagcgccagcttgtcttcaatgaaatcctccaggctgcctaccaactcatggtggatgtgtttggtaattacgtcattcagaagttctttgaatttggcagtcttgaacagaagctggctttggcagaacggattcgaggccacgtcctgtcattggcactacagatgtatggctgccgtgttatccagaaagctcttgagtttattccttcagaccagcagaatgagatggttcgggaactagatggccatgtcttgaagtgtgtgaaagatcagaatggcaatcacgtggttcagaaatgcattgaatgtgtacagccccagtctttgcaatttatcatcgatgcgtttaagggacaggtatttgccttatccacacatccttatggctgccgagtgattcagagaatcctggagcactgtctccctgaccagacactccctattttagaggagcttcaccagcacacagagcagcttgtacaggatcaatatggaaattatgtaatccaacatgtactggagcacggtcgtcctgaggataaaagcaaaattgtagcagaaatccgaggcaatgtacttgtattgagtcagcacaaatttgcaagcaatgttgtggagaagtgtgttactcacgcctcacgtacggagcgcgctgtgctcatcgatgaggtgtgcaccatgaacgacggtccccacagtgccttatacaccatgatgaaggaccagtatgccaactacgtggtccagaagatgattgacgtggcggagccaggccagcggaagatcgtcatgcataagatccggccccacatcgcaactcttcgtaagtacacctatggcaagcacattctggccaagctggagaagtactacatgaagaacggtgttgacttagggcccatctgtggcccccctaatggtatcatctgaggcagtgtcacccgctgttccctcattcccgctgacctcactggcccactggcaaatccaaccagcaaccagaaatgttctagtgtagagtctgagacgggcaagtggttgctccaggattactccctcctccaaaaaaggaatcaaatccacgagtggaaaagcctttgtaaatttaattttattacacataacatgtactattttttttaattgactaattgccctgctgttttactggtgtataggatacttgtacataggtaaccaatgtacatgggaggccacatattttgttcactgttgtatctatatttcacatgtggaaactttcagggtggttggtttaacaaaaaaaaaaagctttaaaaaaaaaagaaaaaaaggaaaaggtttttagctcatttgcctggccggcaagttttgcaaatagctcttccccacctcctcattttagtaaaaaacaaacaaaaacaaaaaaacctgagaagtttgaattgtagttaaatgaccccaaactggcatttaacactgtttataaaaaatatatatatatatatatatatataatgaaaaaggtttcagagttgctaaagcttcagtttgtgacattaagtttatgaaattctaaaaaatgccttttttggagactatattatgctgaagaaggctgttcgtgaggaggagatgcgagcacccagaacgtcttttgaggctgggcgggtgtgattgtttactgcctactggatttttttctattaacattgaaaggtaaaatctgattatttagcatgagaaaaaaaaatccaactctgcttttggtcttgcttctataaatatatagtgtatacttggtgtagactttgcatatatacaaatttgtagtattttcttgttttgatgtctaatctgtatctataatgtaccctagtagtcgaacatacttttgattgtacaattgtacatttgtatacctgtaatgtaaatgtggagaagtttgaatcaacataaacacgttttttggtaagaaaagagaattagccagccctgtgcattcagtgtatattctcaccttttatggtcgtagcatatagtgttgtatattgtaaattgtaatttcaaccagaagtaaatttttttcttttgaaggaataaatgttctttatacagcctagttaatgtttaaaaagaaaaaaatagcttggttttatttgtcatctagtctcaagtatagcgagattctttctaaatgttattcaagattgagttctcactagtgtttttttaatcctaaaaaagtaatgttttgattttgtgacagtcaaaaggacgtgcaaaagtctagccttgcccgagctttccttacaatcagagcccctctcaccttgtaaaaaacctgtgtatgcttatgcctgggcaactattttttgtaactcttgtgtagattgtctctaaacaatgtgtgatctttattttgaaaaatacagaactttggaatctg

SEQ ID NO: 60 - DNA, 4628 bp, Homo sapiens
atgttgtcggagtgaaaggtaagggggagcgagagcgccagagagagaagatcggggggctgaaatccatcttcatcctaccgctccgcccgtgttggtggaatgagcgttgcatgtgtcttgaagagaaaagcagtgctttggcaggactctttcagcccccacctgaaacatcaccctcaagaaccagctaatcccaacatgcctgttgttttgacatctggaacagggtcgcaagcgcagccacaaccagctgcaaatcaggctcttgcagctgggactcactccagccctgtcccaggatctataggagttgcaggccgttcccaggacgacgctatggtggactacttctttcagaggcagcatggtgagcagcttgggggaggaggaagtggaggaggcggctataataatagcaaacatcgatggcctactggggataacattcatgcagaacatcaggtgcgttccatggatgaactgaatcatgattttcaagcacttgctctggagggaagagcgatgggagagccgtacccctggtaattgccagaactctgctaatgaagtggatcttctgggtccaaaccagaatggttctgagggcttagcccagctgaccagcaccaatggtgccaagcctgtggaggatttctccaacatggagtcccagagtgtccccttggaccccatggaacatgtgggcatggagcctcttcagtttgattattcaggcacgcaggtacctgtggactcagcagcagcaactgtgggactttttgactacaattctcaacaacagctgttccaaagacctaatgcgcttgctgtccagcagttgacagctgctcagcagcagcagtatgcactggcagctgctcatcagccgcacatcggtttagctcccgctgcgtttgtccccaatccatacatcatcagcgctgctcccccagggacggacccctacacagctggattggctgcagcagcgacactaggcccagctgtggtccctcaccagtattatggagttactccctggggagtctaccctgccagtcttttccagcagcaagctgccgctgccgctgcagcaactaattcagctaatcaacagaccaccccacaggctcagcaaggacagcagcaggttctccgtggaggagccagccaacgtcctttgaccccaaaccagaaccagcagggacagcaaacggatccccttgtggcagctgcagcagtgaattctgcccttgcatttggacaaggtctggcagcaggcatgccaggttatccggtgttggctcctgctgcttactatgaccaaactggtgcccttgtagtgaatgcaggcgcgagaaatggtcttggagctcctgttcgacttgtagctcctgccccagtcatcattagttcctcagctgcacaagcaggaacacagcagcctcagccccagccccagcagcagcccaataacaacctggcatccagttctttctacggcaacaactctctgaacagcaattcacagagcagctccctcttctcccagggctctgcccagcctgccaacacatccttgggattcggaagtagcagttctctcggcgccaccctgggatccgcccttggagggtttggaacagcagttgcaaactccaacactggcagtggctcccgccgtgactccctgactggcagcagtgacctttataagaggacatcgagcagcttgacccccattggacacagtttttataacggccttagcttttcctcctctcctggacccgtgggcatgcctctccctagtcagggaccaggacattcacagacaccacctccttccctctcttcacatggatcctcttcaagcttaaacctgggaggactcacgaatggcagtggaagatacatctctgctgctccaggcgctgaagccaagtaccgcagtgcaagcagcgcctccagcctcttcagcccgagcagcactcttttctcttcctctcgtttgcgatatggaatgtctgatgtcatgccttctggcaggagcaggcttttggaagattttcgaaacaaccggtaccccaatttacaactgcgggagattgctggacatataatggaattttcccaagaccagcatgggtccagattcattcagctgaaactggagcgtgccacaccagctgagcgccagcttgtcttcaatgaaatcctccaggctgcctaccaactcatggtggatgtgtttggtaattacgtcattcagaagttctttgaatttggcagtcttgaacagaagctggctttggcagaacggattcgaggccacgtcctgtcattggcactacagatgtatggctgccgtgttatccagaaagctcttgagtttattccttcagaccagcagaatgagatggttcgggaactagatggccatgtcttgaagtgtgtgaaagatcagaatggcaatcacgtggttcagaaatgcattgaatgtgtacagccccagtctttgcaatttatcatcgatgcgtttaagggacaggtatttgccttatccacacatccttatggctgccgagtgattcagagaatcctggagcactgtctccctgaccagacactccctattttagaggagcttcaccagcacacagagcagcttgtacaggatcaatatggaaattatgtaatccaacatgtactggagcacggtcgtcctgaggataaaagcaaaattgtagcagaaatccgaggcaatgtacttgtattgagtcagcacaaatttgcaagcaatgttgtggagaagtgtgttactcacgcctcacgtacggagcgcgctgtgctcatcgatgaggtgtgcaccatgaacgacggtccccacagtgccttatacaccatgatgaaggaccagtatgccaactacgtggtccagaagatgattgacgtggcggagccaggccagcggaagatcgtcatgcataagatccggccccacatcgcaactcttcgtaagtacacctatggcaagcacattctggccaagctggagaagtactacatgaagaacggtgttgacttagggcccatctgtggcccccctaatggtatcatctgaggcagtgtcacccgctgttccctcattcccgctgacctcactggcccactggcaaatccaaccagcaaccagaaatgttctagtgtagagtctgagacgggcaagtggttgctccaggattactccctcctccaaaaaaggaatcaaatccacgagtggaaaagcctttgtaaatttaattttattacacataacatgtactattttttttaattgactaattgccctgctgttttactggtgtataggatacttgtacataggtaaccaatgtacatgggaggccacatattttgttcactgttgtatctatatttcacatgtggaaactttcagggtggttggtttaacaaaaaaaaaaagctttaaaaaaaaaagaaaaaaaggaaaaggtttttagctcatttgcctggccggcaagttttgcaaatagctcttccccacctcctcattttagtaaaaaacaaacaaaaacaaaaaaacctgagaagtttgaattgtagttaaatgaccccaaactggcatttaacactgtttataaaaaatatatatatatatatatatatataatgaaaaaggtttcagagttgctaaagcttcagtttgtgacattaagtttatgaaattctaaaaaatgccttttttggagactatattatgctgaagaaggctgttcgtgaggaggagatgcgagcacccagaacgtcttttgaggctgggcgggtgtgattgtttactgcctactggatttttttctattaacattgaaaggtaaaatctgattatttagcatgagaaaaaaaaatccaactctgcttttggtcttgcttctataaatatatagtgtatacttggtgtagactttgcatatatacaaatttgtagtattttcttgttttgatgtctaatctgtatctataatgtaccctagtagtcgaacatacttttgattgtacaattgtacatttgtatacctgtaatgtaaatgtggagaagtttgaatcaacataaacacgttttttggtaagaaaagagaattagccagccctgtgcattcagtgtatattctcaccttttatggtcgtagcatatagtgttgtatattgtaaattgtaatttcaaccagaagtaaatttttttcttttgaaggaataaatgttctttatacagcctagttaatgtttaaaaagaaaaaaatagcttggttttatttgtcatctagtctcaagtatagcgagattctttctaaatgttattcaagattgagttctcactagtgtttttttaatcctaaaaaagtaatgttttgattttgtgacagtcaaaaggacgtgcaaaagtctagccttgcccgagctttccttacaatcagagcccctctcaccttgtaaaaaacctgtgtatgcttatgcctgggcaactattttttgtaactcttgtgtagattgtctctaaacaatgtgtgatctttattttgaaaaatacagaactttggaatctg

SEQ ID NO: 61 - DNA, 4825 bp, Homo sapiens
atgttgtcggagtgaaaggtaagggggagcgagagcgccagagagagaagatcggggggctgaaatccatcttcatcctaccgctccgcccgtgttggtggaatgagcgttgcatgtgtcttgaagagaaaagcagtgctttggcaggactctttcagcccccacctgaaacatcaccctcaagaaccagctaatcccaacatgcctgttgttttgacatctggaacagggtcgcaagcgcagccacaaccagctgcaaatcaggctcttgcagctgggactcactccagccctgtcccaggatctataggagttgcaggccgttcccaggacgacgctatggtggactacttctttcagaggcagcatggtgagcagcttgggggaggaggaagtggaggaggcggctataataatagcaaacatcgatggcctactggggataacattcatgcagaacatcaggtgcgttccatggatgaactgaatcatgattttcaagcacttgctctggagggaagagcgatgggagagccgtacccctggtaattgccagaactctgctaatgaagtggatcttctgggtccaaaccagaatggttctgagggcttagcccagctgaccagcaccaatggtgccaagcctgtggaggatttctccaacatggagtcccagagtgtccccttggaccccatggaacatgtgggcatggagcctcttcagtttgattattcaggcacgcaggtacctgtggactcagcagcagcaactgtgggactttttgactacaattctcaacaacagctgttccaaagacctaatgcgcttgctgtccagcagttgacagctgctcagcagcagcagtatgcactggcagctgctcatcagccgcacatcggcccagctgtggtccctcaccagtattatggagttactccctggggagtctaccctgccagtcttttccagcagcaagctgccgctgccgctgcagcaactaattcagctaatcaacagaccaccccacaggctcagcaaggacagcagcaggttctccgtggaggagccagccaacgtcctttgaccccaaaccagaaccagcagggacagcaaacggatccccttgtggcagctgcagcagtgaattctgcccttgcatttggacaaggtctggcagcaggcatgccaggttatccggtgttggctcctgctgcttactatgaccaaactggtgcccttgtagtgaatgcaggcgcgagaaatggtcttggagctcctgttcgacttgtagctcctgccccagtcatcattagttcctcagctgcacaagcaggaacacagcagcctcagccccagccccagcagcagcccaataacaacctggcatccagttctttctacggcaacaactctctgaacagcaattcacagagcagctccctcttctcccagggctctgcccagcctgccaacacatccttgggattcggaagtagcagttctctcggcgccaccctgggatccgcccttggagggtttggaacagcagttgcaaactccaacactggcagtggctcccgccgtgactccctgactggcagcagtgacctttataagaggacatcgagcagcttgacccccattggacacagtttttataacggccttagcttttcctcctctcctggacccgtgggcatgcctctccctagtcagggaccaggacattcacagacaccacctccttccctctcttcacatggatcctcttcaagcttaaacctgggaggactcacgaatggcagtggaagatacatctctgctgctccaggcgctgaagccaagtaccgcagtgcaagcagcgcctccagcctcttcagcccgagcagcactcttttctcttcctctcgtttgcgatatggaatgtctgatgtcatgccttctggcaggagcaggcttttggaagattttcgaaacaaccggtaccccaatttacaactgcgggagattgctggacatataatggaattttcccaagaccagcatgggtccagattcattcagctgaaactggagcgtgccacaccagctgagcgccagcttgtcttcaatgaaatcctccaggctgcctaccaactcatggtggatgtgtttggtaattacgtcattcagaagttctttgaatttggcagtcttgaacagaagctggctttggcagaacggattcgaggccacgtcctgtcattggcactacagatgtatggctgccgtgttatccagaaagctcttgagtttattccttcagaccagcagaatgagatggttcgggaactagatggccatgtcttgaagtgtgtgaaagatcagaatggcaatcacgtggttcagaaatgcattgaatgtgtacagccccagtctttgcaatttatcatcgatgcgtttaagggacaggtatttgccttatccacacatccttatggctgccgagtgattcagagaatcctggagcactgtctccctgaccagacactccctattttagaggagcttcaccagcacacagagcagcttgtacaggatcaatatggaaattatgtaatccaacatgtactggagcacggtcgtcctgaggataaaagcaaaattgtagcagaaatccgaggcaatgtacttgtattgagtcagcacaaatttgcaagcaatgttgtggagaagtgtgttactcacgcctcacgtacggagcgcgctgtgctcatcgatgaggtgtgcaccatgaacgacggtccccacagtgccttatacaccatgatgaaggaccagtatgccaactacgtggtccagaagatgattgacgtggcggagccaggccagcggaagatcgtcatgcataagatccggccccacatcgcaactcttcgtaagtacacctatggcaagcacattctggccaagctggagaagtactacatgaagaacggtgttgacttagggcccatctgtggcccccctaatggtatcatctgaggcagtgtcacccgctgttccctcattcccgctgacctcactggcccactggcaaatccaaccagcaaccagaaatgttctagtgtagagtctgagacgggcaagtggttgctccaggattactccctcctccaaaaaaggaatcaaatccacgagtggaaaagcctttgtaaatttaattttattacacataacatgtactattttttttaattgactaattgccctgctgttttactggtgtataggatacttgtacataggtaaccaatgtacatgggaggccacatattttgttcactgttgtatctatatttcacatgtggaaactttcagggtggttggtttaacaaaaaaaaaaagctttaaaaaaaaaagaaaaaaaggaaaaggtttttagctcatttgcctggccggcaagttttgcaaatagctcttccccacctcctcattttagtaaaaaacaaacaaaaacaaaaaaacctgagaagtttgaattgtagttaaatgaccccaaactggcatttaacactgtttataaaaaatatatatatatatatatatatataatgaaaaaggtttcagagttgctaaagcttcagtttgtgacattaagtttatgaaattctaaaaaatgccttttttggagactatattatgctgaagaaggctgttcgtgaggaggagatgcgagcacccagaacgtcttttgaggctgggcgggtgtgattgtttactgcctactggatttttttctattaacattgaaaggtaaaatctgattatttagcatgagaaaaaaaaatccaactctgcttttggtcttgcttctataaatatatagtgtatacttggtgtagactttgcatatatacaaatttgtagtattttcttgttttgatgtctaatctgtatctataatgtaccctagtagtcgaacatacttttgattgtacaattgtacatttgtatacctgtaatgtaaatgtggagaagtttgaatcaacataaacacgttttttggtaagaaaagagaattagccagccctgtgcattcagtgtatattctcaccttttatggtcgtagcatatagtgttgtatattgtaaattgtaatttcaaccagaagtaaatttttttcttttgaaggaataaatgttctttatacagcctagttaatgtttaaaaagaaaaaaatagcttggttttatttgtcatctagtctcaagtatagcgagattctttctaaatgttattcaagattgagttctcactagtgtttttttaatcctaaaaaagtaatgttttgattttgtgacagtcaaaaggacgtgcaaaagtctagccttgcccgagctttccttacaatcagagcccctctcaccttgtaaagtgtgaatcgcccttcccttttgtacagaagatgaactgtattttgcattttgtctacttgtaagtgaatgtaacatactgtcaattttccttgtttgaatatagaattgtaacactacacggtgtacatttccagagccttgtgtatatttccaatgaacttttttgcaagcacacttgtaaccatatgtgtataattaacaaacctgtgtatgcttatgcctgggcaactattttttgtaactcttgtgtagattgtctctaaacaatgtgtgatctttattttgaaaaatacagaactttggaatctgaaaaaaaaaaaaaaaaaaaaaaaamaamaaaaasaaaaaacaaaacaaaaacarrmaamaraaamaaacacaaaaraaarammaaaacacaacaaca

SEQ ID NO: 62 - DNA, 4728 bp, Homo sapiens
atgttgtcggagtgaaaggtaagggggagcgagagcgccagagagagaagatcggggggctgaaatccatcttcatcctaccgctccgcccgtgttggtggaatgagcgttgcatgtgtcttgaagagaaaagcagtgctttggcaggactctttcagcccccacctgaaacatcaccctcaagaaccagctaatcccaacatgcctgttgttttgacatctggaacagggtcgcaagcgcagccacaaccagctgcaaatcaggctcttgcagctgggactcactccagccctgtcccaggatctataggagttgcaggccgttcccaggacgacgctatggtggactacttctttcagaggcagcatggtgagcagcttgggggaggaggaagtggaggaggcggctataataatagcaaacatcgatggcctactggggataacattcatgcagaacatcaggtgcgttccatggatgaactgaatcatgattttcaagcacttgctctggagggaagagcgatgggagagccgtacccctggtaattgccagaactctgctaatgaagtggatcttctgggtccaaaccagaatggttctgagggcttagcccagctgaccagcaccaatggtgccaagcctgtggaggatttctccaacatggagtcccagagtgtccccttggaccccatggaacatgtgggcatggagcctcttcagtttgattattcaggcacgcaggtacctgtggactcagcagcagcaactgtgggactttttgactacaattctcaacaacagctgttccaaagacctaatgcgcttgctgtccagcagttgacagctgctcagcagcagcagtatgcactggcagctgctcatcagccgcacatcggcccagctgtggtccctcaccagtattatggagttactccctggggagtctaccctgccagtcttttccagcagcaagctgccgctgccgctgcagcaactaattcagctaatcaacagaccaccccacaggctcagcaaggacagcagcaggttctccgtggaggagccagccaacgtcctttgaccccaaaccagaaccagcagggacagcaaacggatccccttgtggcagctgcagcagtgaattctgcccttgcatttggacaaggtctggcagcaggcatgccaggttatccggtgttggctcctgctgcttactatgaccaaactggtgcccttgtagtgaatgcaggcgcgagaaatggtcttggagctcctgttcgacttgtagctcctgccccagtcatcattagttcctcagctgcacaagcaggaacacagcagcctcagccccagccccagcagcagcccaataacaacctggcatccagttctttctacggcaacaactctctgaacagcaattcacagagcagctccctcttctcccagggctctgcccagcctgccaacacatccttgggattcggaagtagcagttctctcggcgccaccctgggatccgcccttggagggtttggaacagcagttgcaaactccaacactggcagtggctcccgccgtgactccctgactggcagcagtgacctttataagaggacatcgagcagcttgacccccattggacacagtttttataacggccttagcttttcctcctctcctggacccgtgggcatgcctctccctagtcagggaccaggacattcacagacaccacctccttccctctcttcacatggatcctcttcaagcttaaacctgggaggactcacgaatggcagtggaagatacatctctgctgctccaggcgctgaagccaagtaccgcagtgcaagcagcgcctccagcctcttcagcccgagcagcactcttttctcttcctctcgtttgcgatatggaatgtctgatgtcatgccttctggcaggagcaggcttttggaagattttcgaaacaaccggtaccccaatttacaactgcgggagattgctggacatataatggaattttcccaagaccagcatgggtccagattcattcagctgaaactggagcgtgccacaccagctgagcgccagcttgtcttcaatgaaatcctccaggctgcctaccaactcatggtggatgtgtttggtaattacgtcattcagaagttctttgaatttggcagtcttgaacagaagctggctttggcagaacggattcgaggccacgtcctgtcattggcactacagatgtatggctgccgtgttatccagaaagctcttgagtttattccttcagaccagcagaatgagatggttcgggaactagatggccatgtcttgaagtgtgtgaaagatcagaatggcaatcacgtggttcagaaatgcattgaatgtgtacagccccagtctttgcaatttatcatcgatgcgtttaagggacaggtatttgccttatccacacatccttatggctgccgagtgattcagagaatcctggagcactgtctccctgaccagacactccctattttagaggagcttcaccagcacacagagcagcttgtacaggatcaatatggaaattatgtaatccaacatgtactggagcacggtcgtcctgaggataaaagcaaaattgtagcagaaatccgaggcaatgtacttgtattgagtcagcacaaatttgcaagcaatgttgtggagaagtgtgttactcacgcctcacgtacggagcgcgctgtgctcatcgatgaggtgtgcaccatgaacgacggtccccacagtgccttatacaccatgatgaaggaccagtatgccaactacgtggtccagaagatgattgacgtggcggagccaggccagcggaagatcgtcatgcataagatccggccccacatcgcaactcttcgtaagtacacctatggcaagcacattctggccaagctggagaagtactacatgaagaacggtgttgacttagggcccatctgtggcccccctaatggtatcatctgaggcagtgtcacccgctgttccctcattcccgctgacctcactggcccactggcaaatccaaccagcaaccagaaatgttctagtgtagagtctgagacgggcaagtggttgctccaggattactccctcctccaaaaaaggaatcaaatccacgagtggaaaagcctttgtaaatttaattttattacacataacatgtactattttttttaattgactaattgccctgctgttttactggtgtataggatacttgtacataggtaaccaatgtacatgggaggccacatattttgttcactgttgtatctatatttcacatgtggaaactttcagggtggttggtttaacaaaaaaaaaaagctttaaaaaaaaaagaaaaaaaggaaaaggtttttagctcatttgcctggccggcaagttttgcaaatagctcttccccacctcctcattttagtaaaaaacaaacaaaaacaaaaaaacctgagaagtttgaattgtagttaaatgaccccaaactggcatttaacactgtttataaaaaatatatatatatatatatatatataatgaaaaaggtttcagagttgctaaagcttcagtttgtgacattaagtttatgaaattctaaaaaatgccttttttggagactatattatgctgaagaaggctgttcgtgaggaggagatgcgagcacccagaacgtcttttgaggctgggcgggtgtgattgtttactgcctactggatttttttctattaacattgaaaggtaaaatctgattatttagcatgagaaaaaaaaatccaactctgcttttggtcttgcttctataaatatatagtgtatacttggtgtagactttgcatatatacaaatttgtagtattttcttgttttgatgtctaatctgtatctataatgtaccctagtagtcgaacatacttttgattgtacaattgtacatttgtatacctgtaatgtaaatgtggagaagtttgaatcaacataaacacgttttttggtaagaaaagagaattagccagccctgtgcattcagtgtatattctcaccttttatggtcgtagcatatagtgttgtatattgtaaattgtaatttcaaccagaagtaaatttttttcttttgaaggaataaatgttctttatacagcctagttaatgtttaaaaagaaaaaaatagcttggttttatttgtcatctagtctcaagtatagcgagattctttctaaatgttattcaagattgagttctcactagtgtttttttaatcctaaaaaagtaatgttttgattttgtgacagtcaaaaggacgtgcaaaagtctagccttgcccgagctttccttacaatcagagcccctctcaccttgtaaagtgtgaatcgcccttcccttttgtacagaagatgaactgtattttgcattttgtctacttgtaagtgaatgtaacatactgtcaattttccttgtttgaatatagaattgtaacactacacggtgtacatttccagagccttgtgtatatttccaatgaacttttttgcaagcacacttgtaaccatatgtgtataattaacaaacctgtgtatgcttatgcctgggcaactattttttgtaactcttgtgtagattgtctctaaacaatgtgtgatctttattttgaaaaatacagaactttggaatctg

SEQ ID NO: 63 - DNA, 4526 bp, Homo sapiens
atgttgtcggagtgaaaggtaagggggagcgagagcgccagagagagaagatcggggggctgaaatccatcttcatcctaccgctccgcccgtgttggtggaatgagcgttgcatgtgtcttgaagagaaaagcagtgctttggcaggactctttcagcccccacctgaaacatcaccctcaagaaccagctaatcccaacatgcctgttgttttgacatctggaacagggtcgcaagcgcagccacaaccagctgcaaatcaggctcttgcagctgggactcactccagccctgtcccaggatctataggagttgcaggccgttcccaggacgacgctatggtggactacttctttcagaggcagcatggtgagcagcttgggggaggaggaagtggaggaggcggctataataatagcaaacatcgatggcctactggggataacattcatgcagaacatcaggtgcgttccatggatgaactgaatcatgattttcaagcacttgctctggagggaagagcgatgggagagccgtacccctggtaattgccagaactctgctaatgaagtggatcttctgggtccaaaccagaatggttctgagggcttagcccagctgaccagcaccaatggtgccaagcctgtggaggatttctccaacatggagtcccagagtgtccccttggaccccatggaacatgtgggcatggagcctcttcagtttgattattcaggcacgcaggtacctgtggactcagcagcagcaactgtgggactttttgactacaattctcaacaacagctgttccaaagacctaatgcgcttgctgtccagcagttgacagctgctcagcagcagcagtatgcactggcagctgctcatcagccgcacatcggcccagctgtggtccctcaccagtattatggagttactccctggggagtctaccctgccagtcttttccagcagcaagctgccgctgccgctgcagcaactaattcagctaatcaacagaccaccccacaggctcagcaaggacagcagcaggttctccgtggaggagccagccaacgtcctttgaccccaaaccagaaccagcagggacagcaaacggatccccttgtggcagctgcagcagtgaattctgcccttgcatttggacaaggtctggcagcaggcatgccaggttatccggtgttggctcctgctgcttactatgaccaaactggtgcccttgtagtgaatgcaggcgcgagaaatggtcttggagctcctgttcgacttgtagctcctgccccagtcatcattagttcctcagctgcacaagcaggaacacagcagcctcagccccagccccagcagcagcccaataacaacctggcatccagttctttctacggcaacaactctctgaacagcaattcacagagcagctccctcttctcccagggctctgcccagcctgccaacacatccttgggattcggaagtagcagttctctcggcgccaccctgggatccgcccttggagggtttggaacagcagttgcaaactccaacactggcagtggctcccgccgtgactccctgactggcagcagtgacctttataagaggacatcgagcagcttgacccccattggacacagtttttataacggccttagcttttcctcctctcctggacccgtgggcatgcctctccctagtcagggaccaggacattcacagacaccacctccttccctctcttcacatggatcctcttcaagcttaaacctgggaggactcacgaatggcagtggaagatacatctctgctgctccaggcgctgaagccaagtaccgcagtgcaagcagcgcctccagcctcttcagcccgagcagcactcttttctcttcctctcgtttgcgatatggaatgtctgatgtcatgccttctggcaggagcaggcttttggaagattttcgaaacaaccggtaccccaatttacaactgcgggagattgctggacatataatggaattttcccaagaccagcatgggtccagattcattcagctgaaactggagcgtgccacaccagctgagcgccagcttgtcttcaatgaaatcctccaggctgcctaccaactcatggtggatgtgtttggtaattacgtcattcagaagttctttgaatttggcagtcttgaacagaagctggctttggcagaacggattcgaggccacgtcctgtcattggcactacagatgtatggctgccgtgttatccagaaagctcttgagtttattccttcagaccagcagaatgagatggttcgggaactagatggccatgtcttgaagtgtgtgaaagatcagaatggcaatcacgtggttcagaaatgcattgaatgtgtacagccccagtctttgcaatttatcatcgatgcgtttaagggacaggtatttgccttatccacacatccttatggctgccgagtgattcagagaatcctggagcactgtctccctgaccagacactccctattttagaggagcttcaccagcacacagagcagcttgtacaggatcaatatggaaattatgtaatccaacatgtactggagcacggtcgtcctgaggataaaagcaaaattgtagcagaaatccgaggcaatgtacttgtattgagtcagcacaaatttgcaagcaatgttgtggagaagtgtgttactcacgcctcacgtacggagcgcgctgtgctcatcgatgaggtgtgcaccatgaacgacggtccccacagtgccttatacaccatgatgaaggaccagtatgccaactacgtggtccagaagatgattgacgtggcggagccaggccagcggaagatcgtcatgcataagatccggccccacatcgcaactcttcgtaagtacacctatggcaagcacattctggccaagctggagaagtactacatgaagaacggtgttgacttagggcccatctgtggcccccctaatggtatcatctgaggcagtgtcacccgctgttccctcattcccgctgacctcactggcccactggcaaatccaaccagcaaccagaaatgttctagtgtagagtctgagacgggcaagtggttgctccaggattactccctcctccaaaaaaggaatcaaatccacgagtggaaaagcctttgtaaatttaattttattacacataacatgtactattttttttaattgactaattgccctgctgttttactggtgtataggatacttgtacataggtaaccaatgtacatgggaggccacatattttgttcactgttgtatctatatttcacatgtggaaactttcagggtggttggtttaacaaaaaaaaaaagctttaaaaaaaaaagaaaaaaaggaaaaggtttttagctcatttgcctggccggcaagttttgcaaatagctcttccccacctcctcattttagtaaaaaacaaacaaaaacaaaaaaacctgagaagtttgaattgtagttaaatgaccccaaactggcatttaacactgtttataaaaaatatatatatatatatatatatataatgaaaaaggtttcagagttgctaaagcttcagtttgtgacattaagtttatgaaattctaaaaaatgccttttttggagactatattatgctgaagaaggctgttcgtgaggaggagatgcgagcacccagaacgtcttttgaggctgggcgggtgtgattgtttactgcctactggatttttttctattaacattgaaaggtaaaatctgattatttagcatgagaaaaaaaaatccaactctgcttttggtcttgcttctataaatatatagtgtatacttggtgtagactttgcatatatacaaatttgtagtattttcttgttttgatgtctaatctgtatctataatgtaccctagtagtcgaacatacttttgattgtacaattgtacatttgtatacctgtaatgtaaatgtggagaagtttgaatcaacataaacacgttttttggtaagaaaagagaattagccagccctgtgcattcagtgtatattctcaccttttatggtcgtagcatatagtgttgtatattgtaaattgtaatttcaaccagaagtaaatttttttcttttgaaggaataaatgttctttatacagcctagttaatgtttaaaaagaaaaaaatagcttggttttatttgtcatctagtctcaagtatagcgagattctttctaaatgttattcaagattgagttctcactagtgtttttttaatcctaaaaaagtaatgttttgattttgtgacagtcaaaaggacgtgcaaaagtctagccttgcccgagctttccttacaatcagagcccctctcaccttgtaaaaaacctgtgtatgcttatgcctgggcaactattttttgtaactcttgtgtagattgtctctaaacaatgtgtgatctttattttgaaaaatacagaactttggaatctg

SEQ ID NO: 64 - DNA, 4906 bp, Homo sapiens
atgttgtcggagtgaaaggtaagggggagcgagagcgccagagagagaagatcggggggctgaaatccatcttcatcctaccgctccgcccgtgttggtggaatgagcgttgcatgtgtcttgaagagaaaagcagtgctttggcaggactctttcagcccccacctgaaacatcaccctcaagaaccagctaatcccaacatgcctgttgttttgacatctggaacagggtcgcaagcgcagccacaaccagctgcaaatcaggctcttgcagctgggactcactccagccctgtcccaggatctataggagttgcaggccgttcccaggacgacgctatggtggactacttctttcagaggcagcatggtgagcagcttgggggaggaggaagtggaggaggcggctataataatagcaaacatcgatggcctactggggataacattcatgcagaacatcaggtgcgttccatggatgaactgaatcatgattttcaagcacttgctctggagggaagagcgatgggagagccgtacccctggtaattgccagaactctgctaatgaagtggatcttctgggtccaaaccagaatggttctgagggcttagcccagctgaccagcaccaatggtgccaagcctgtggaggatttctccaacatggagtcccagagtgtccccttggaccccatggaacatgtgggcatggagcctcttcagtttgattattcaggcacgcaggtacctgtggactcagcagcagcaactgtgggactttttgactacaattctcaacaacagctgttccaaagacctaatgcgcttgctgtccagcagttgacagctgctcagcagcagcagtatgcactggcagctgctcatcagccgcacatcggcccagctgtggtccctcaccagtattatggagttactccctggggagtctaccctgccagtcttttccagcagcaagctgccgctgccgctgcagcaactaattcagctaatcaacagaccaccccacaggctcagcaaggacagcagcaggttctccgtggaggagccagccaacgtcctttgaccccaaaccagaaccagcagggacagcaaacggatccccttgtggcagctgcagcagtgaattctgcccttgcatttggacaaggtctggcagcaggcatgccaggttatccggtgttggctcctgctgcttactatgaccaaactggtgcccttgtagtgaatgcaggcgcgagaaatggtcttggagctcctgttcgacttgtagctcctgccccagtcatcattagttcctcagctgcacaagcagctgttgcagcagccgcagcttcagcaaatggagcagctggtggtcttgctggaacaacaaatggaccatttcgccctttaggaacacagcagcctcagccccagccccagcagcagcccaataacaacctggcatccagttctttctacggcaacaactctctgaacagcaattcacagagcagctccctcttctcccagggctctgcccagcctgccaacacatccttgggattcggaagtagcagttctctcggcgccaccctgggatccgcccttggagggtttggaacagcagttgcaaactccaacactggcagtggctcccgccgtgactccctgactggcagcagtgacctttataagaggacatcgagcagcttgacccccattggacacagtttttataacggccttagcttttcctcctctcctggacccgtgggcatgcctctccctagtcagggaccaggacattcacagacaccacctccttccctctcttcacatggatcctcttcaagcttaaacctgggaggactcacgaatggcagtggaagatacatctctgctgctccaggcgctgaagccaagtaccgcagtgcaagcagcgcctccagcctcttcagcccgagcagcactcttttctcttcctctcgtttgcgatatggaatgtctgatgtcatgccttctggcaggagcaggcttttggaagattttcgaaacaaccggtaccccaatttacaactgcgggagattgctggacatataatggaattttcccaagaccagcatgggtccagattcattcagctgaaactggagcgtgccacaccagctgagcgccagcttgtcttcaatgaaatcctccaggctgcctaccaactcatggtggatgtgtttggtaattacgtcattcagaagttctttgaatttggcagtcttgaacagaagctggctttggcagaacggattcgaggccacgtcctgtcattggcactacagatgtatggctgccgtgttatccagaaagctcttgagtttattccttcagaccagcagaatgagatggttcgggaactagatggccatgtcttgaagtgtgtgaaagatcagaatggcaatcacgtggttcagaaatgcattgaatgtgtacagccccagtctttgcaatttatcatcgatgcgtttaagggacaggtatttgccttatccacacatccttatggctgccgagtgattcagagaatcctggagcactgtctccctgaccagacactccctattttagaggagcttcaccagcacacagagcagcttgtacaggatcaatatggaaattatgtaatccaacatgtactggagcacggtcgtcctgaggataaaagcaaaattgtagcagaaatccgaggcaatgtacttgtattgagtcagcacaaatttgcaagcaatgttgtggagaagtgtgttactcacgcctcacgtacggagcgcgctgtgctcatcgatgaggtgtgcaccatgaacgacggtccccacagtgccttatacaccatgatgaaggaccagtatgccaactacgtggtccagaagatgattgacgtggcggagccaggccagcggaagatcgtcatgcataagatccggccccacatcgcaactcttcgtaagtacacctatggcaagcacattctggccaagctggagaagtactacatgaagaacggtgttgacttagggcccatctgtggcccccctaatggtatcatctgaggcagtgtcacccgctgttccctcattcccgctgacctcactggcccactggcaaatccaaccagcaaccagaaatgttctagtgtagagtctgagacgggcaagtggttgctccaggattactccctcctccaaaaaaggaatcaaatccacgagtggaaaagcctttgtaaatttaattttattacacataacatgtactattttttttaattgactaattgccctgctgttttactggtgtataggatacttgtacataggtaaccaatgtacatgggaggccacatattttgttcactgttgtatctatatttcacatgtggaaactttcagggtggttggtttaacaaaaaaaaaaagctttaaaaaaaaaagaaaaaaaggaaaaggtttttagctcatttgcctggccggcaagttttgcaaatagctcttccccacctcctcattttagtaaaaaacaaacaaaaacaaaaaaacctgagaagtttgaattgtagttaaatgaccccaaactggcatttaacactgtttataaaaaatatatatatatatatatatatataatgaaaaaggtttcagagttgctaaagcttcagtttgtgacattaagtttatgaaattctaaaaaatgccttttttggagactatattatgctgaagaaggctgttcgtgaggaggagatgcgagcacccagaacgtcttttgaggctgggcgggtgtgattgtttactgcctactggatttttttctattaacattgaaaggtaaaatctgattatttagcatgagaaaaaaaaatccaactctgcttttggtcttgcttctataaatatatagtgtatacttggtgtagactttgcatatatacaaatttgtagtattttcttgttttgatgtctaatctgtatctataatgtaccctagtagtcgaacatacttttgattgtacaattgtacatttgtatacctgtaatgtaaatgtggagaagtttgaatcaacataaacacgttttttggtaagaaaagagaattagccagccctgtgcattcagtgtatattctcaccttttatggtcgtagcatatagtgttgtatattgtaaattgtaatttcaaccagaagtaaatttttttcttttgaaggaataaatgttctttatacagcctagttaatgtttaaaaagaaaaaaatagcttggttttatttgtcatctagtctcaagtatagcgagattctttctaaatgttattcaagattgagttctcactagtgtttttttaatcctaaaaaagtaatgttttgattttgtgacagtcaaaaggacgtgcaaaagtctagccttgcccgagctttccttacaatcagagcccctctcaccttgtaaagtgtgaatcgcccttcccttttgtacagaagatgaactgtattttgcattttgtctacttgtaagtgaatgtaacatactgtcaattttccttgtttgaatatagaattgtaacactacacggtgtacatttccagagccttgtgtatatttccaatgaacttttttgcaagcacacttgtaaccatatgtgtataattaacaaacctgtgtatgcttatgcctgggcaactattttttgtaactcttgtgtagattgtctctaaacaatgtgtgatctttattttgaaaaatacagaactttggaatctgaaaaaaaaaaaaaaaaaaaaaaaamaamaaaaasaaaaaacaaaacaaaaacarrmaamaraaamaaacacaaaaraaarammaaaacacaacaaca

SEQ ID NO: 65 - DNA, 4809 bp, Homo sapiens
atgttgtcggagtgaaaggtaagggggagcgagagcgccagagagagaagatcggggggctgaaatccatcttcatcctaccgctccgcccgtgttggtggaatgagcgttgcatgtgtcttgaagagaaaagcagtgctttggcaggactctttcagcccccacctgaaacatcaccctcaagaaccagctaatcccaacatgcctgttgttttgacatctggaacagggtcgcaagcgcagccacaaccagctgcaaatcaggctcttgcagctgggactcactccagccctgtcccaggatctataggagttgcaggccgttcccaggacgacgctatggtggactacttctttcagaggcagcatggtgagcagcttgggggaggaggaagtggaggaggcggctataataatagcaaacatcgatggcctactggggataacattcatgcagaacatcaggtgcgttccatggatgaactgaatcatgattttcaagcacttgctctggagggaagagcgatgggagagccgtacccctggtaattgccagaactctgctaatgaagtggatcttctgggtccaaaccagaatggttctgagggcttagcccagctgaccagcaccaatggtgccaagcctgtggaggatttctccaacatggagtcccagagtgtccccttggaccccatggaacatgtgggcatggagcctcttcagtttgattattcaggcacgcaggtacctgtggactcagcagcagcaactgtgggactttttgactacaattctcaacaacagctgttccaaagacctaatgcgcttgctgtccagcagttgacagctgctcagcagcagcagtatgcactggcagctgctcatcagccgcacatcggcccagctgtggtccctcaccagtattatggagttactccctggggagtctaccctgccagtcttttccagcagcaagctgccgctgccgctgcagcaactaattcagctaatcaacagaccaccccacaggctcagcaaggacagcagcaggttctccgtggaggagccagccaacgtcctttgaccccaaaccagaaccagcagggacagcaaacggatccccttgtggcagctgcagcagtgaattctgcccttgcatttggacaaggtctggcagcaggcatgccaggttatccggtgttggctcctgctgcttactatgaccaaactggtgcccttgtagtgaatgcaggcgcgagaaatggtcttggagctcctgttcgacttgtagctcctgccccagtcatcattagttcctcagctgcacaagcagctgttgcagcagccgcagcttcagcaaatggagcagctggtggtcttgctggaacaacaaatggaccatttcgccctttaggaacacagcagcctcagccccagccccagcagcagcccaataacaacctggcatccagttctttctacggcaacaactctctgaacagcaattcacagagcagctccctcttctcccagggctctgcccagcctgccaacacatccttgggattcggaagtagcagttctctcggcgccaccctgggatccgcccttggagggtttggaacagcagttgcaaactccaacactggcagtggctcccgccgtgactccctgactggcagcagtgacctttataagaggacatcgagcagcttgacccccattggacacagtttttataacggccttagcttttcctcctctcctggacccgtgggcatgcctctccctagtcagggaccaggacattcacagacaccacctccttccctctcttcacatggatcctcttcaagcttaaacctgggaggactcacgaatggcagtggaagatacatctctgctgctccaggcgctgaagccaagtaccgcagtgcaagcagcgcctccagcctcttcagcccgagcagcactcttttctcttcctctcgtttgcgatatggaatgtctgatgtcatgccttctggcaggagcaggcttttggaagattttcgaaacaaccggtaccccaatttacaactgcgggagattgctggacatataatggaattttcccaagaccagcatgggtccagattcattcagctgaaactggagcgtgccacaccagctgagcgccagcttgtcttcaatgaaatcctccaggctgcctaccaactcatggtggatgtgtttggtaattacgtcattcagaagttctttgaatttggcagtcttgaacagaagctggctttggcagaacggattcgaggccacgtcctgtcattggcactacagatgtatggctgccgtgttatccagaaagctcttgagtttattccttcagaccagcagaatgagatggttcgggaactagatggccatgtcttgaagtgtgtgaaagatcagaatggcaatcacgtggttcagaaatgcattgaatgtgtacagccccagtctttgcaatttatcatcgatgcgtttaagggacaggtatttgccttatccacacatccttatggctgccgagtgattcagagaatcctggagcactgtctccctgaccagacactccctattttagaggagcttcaccagcacacagagcagcttgtacaggatcaatatggaaattatgtaatccaacatgtactggagcacggtcgtcctgaggataaaagcaaaattgtagcagaaatccgaggcaatgtacttgtattgagtcagcacaaatttgcaagcaatgttgtggagaagtgtgttactcacgcctcacgtacggagcgcgctgtgctcatcgatgaggtgtgcaccatgaacgacggtccccacagtgccttatacaccatgatgaaggaccagtatgccaactacgtggtccagaagatgattgacgtggcggagccaggccagcggaagatcgtcatgcataagatccggccccacatcgcaactcttcgtaagtacacctatggcaagcacattctggccaagctggagaagtactacatgaagaacggtgttgacttagggcccatctgtggcccccctaatggtatcatctgaggcagtgtcacccgctgttccctcattcccgctgacctcactggcccactggcaaatccaaccagcaaccagaaatgttctagtgtagagtctgagacgggcaagtggttgctccaggattactccctcctccaaaaaaggaatcaaatccacgagtggaaaagcctttgtaaatttaattttattacacataacatgtactattttttttaattgactaattgccctgctgttttactggtgtataggatacttgtacataggtaaccaatgtacatgggaggccacatattttgttcactgttgtatctatatttcacatgtggaaactttcagggtggttggtttaacaaaaaaaaaaagctttaaaaaaaaaagaaaaaaaggaaaaggtttttagctcatttgcctggccggcaagttttgcaaatagctcttccccacctcctcattttagtaaaaaacaaacaaaaacaaaaaaacctgagaagtttgaattgtagttaaatgaccccaaactggcatttaacactgtttataaaaaatatatatatatatatatatatataatgaaaaaggtttcagagttgctaaagcttcagtttgtgacattaagtttatgaaattctaaaaaatgccttttttggagactatattatgctgaagaaggctgttcgtgaggaggagatgcgagcacccagaacgtcttttgaggctgggcgggtgtgattgtttactgcctactggatttttttctattaacattgaaaggtaaaatctgattatttagcatgagaaaaaaaaatccaactctgcttttggtcttgcttctataaatatatagtgtatacttggtgtagactttgcatatatacaaatttgtagtattttcttgttttgatgtctaatctgtatctataatgtaccctagtagtcgaacatacttttgattgtacaattgtacatttgtatacctgtaatgtaaatgtggagaagtttgaatcaacataaacacgttttttggtaagaaaagagaattagccagccctgtgcattcagtgtatattctcaccttttatggtcgtagcatatagtgttgtatattgtaaattgtaatttcaaccagaagtaaatttttttcttttgaaggaataaatgttctttatacagcctagttaatgtttaaaaagaaaaaaatagcttggttttatttgtcatctagtctcaagtatagcgagattctttctaaatgttattcaagattgagttctcactagtgtttttttaatcctaaaaaagtaatgttttgattttgtgacagtcaaaaggacgtgcaaaagtctagccttgcccgagctttccttacaatcagagcccctctcaccttgtaaagtgtgaatcgcccttcccttttgtacagaagatgaactgtattttgcattttgtctacttgtaagtgaatgtaacatactgtcaattttccttgtttgaatatagaattgtaacactacacggtgtacatttccagagccttgtgtatatttccaatgaacttttttgcaagcacacttgtaaccatatgtgtataattaacaaacctgtgtatgcttatgcctgggcaactattttttgtaactcttgtgtagattgtctctaaacaatgtgtgatctttattttgaaaaatacagaactttggaatctg

SEQ ID NO: 66 - DNA, 4607 bp, Homo sapiens
atgttgtcggagtgaaaggtaagggggagcgagagcgccagagagagaagatcggggggctgaaatccatcttcatcctaccgctccgcccgtgttggtggaatgagcgttgcatgtgtcttgaagagaaaagcagtgctttggcaggactctttcagcccccacctgaaacatcaccctcaagaaccagctaatcccaacatgcctgttgttttgacatctggaacagggtcgcaagcgcagccacaaccagctgcaaatcaggctcttgcagctgggactcactccagccctgtcccaggatctataggagttgcaggccgttcccaggacgacgctatggtggactacttctttcagaggcagcatggtgagcagcttgggggaggaggaagtggaggaggcggctataataatagcaaacatcgatggcctactggggataacattcatgcagaacatcaggtgcgttccatggatgaactgaatcatgattttcaagcacttgctctggagggaagagcgatgggagagccgtacccctggtaattgccagaactctgctaatgaagtggatcttctgggtccaaaccagaatggttctgagggcttagcccagctgaccagcaccaatggtgccaagcctgtggaggatttctccaacatggagtcccagagtgtccccttggaccccatggaacatgtgggcatggagcctcttcagtttgattattcaggcacgcaggtacctgtggactcagcagcagcaactgtgggactttttgactacaattctcaacaacagctgttccaaagacctaatgcgcttgctgtccagcagttgacagctgctcagcagcagcagtatgcactggcagctgctcatcagccgcacatcggcccagctgtggtccctcaccagtattatggagttactccctggggagtctaccctgccagtcttttccagcagcaagctgccgctgccgctgcagcaactaattcagctaatcaacagaccaccccacaggctcagcaaggacagcagcaggttctccgtggaggagccagccaacgtcctttgaccccaaaccagaaccagcagggacagcaaacggatccccttgtggcagctgcagcagtgaattctgcccttgcatttggacaaggtctggcagcaggcatgccaggttatccggtgttggctcctgctgcttactatgaccaaactggtgcccttgtagtgaatgcaggcgcgagaaatggtcttggagctcctgttcgacttgtagctcctgccccagtcatcattagttcctcagctgcacaagcagctgttgcagcagccgcagcttcagcaaatggagcagctggtggtcttgctggaacaacaaatggaccatttcgccctttaggaacacagcagcctcagccccagccccagcagcagcccaataacaacctggcatccagttctttctacggcaacaactctctgaacagcaattcacagagcagctccctcttctcccagggctctgcccagcctgccaacacatccttgggattcggaagtagcagttctctcggcgccaccctgggatccgcccttggagggtttggaacagcagttgcaaactccaacactggcagtggctcccgccgtgactccctgactggcagcagtgacctttataagaggacatcgagcagcttgacccccattggacacagtttttataacggccttagcttttcctcctctcctggacccgtgggcatgcctctccctagtcagggaccaggacattcacagacaccacctccttccctctcttcacatggatcctcttcaagcttaaacctgggaggactcacgaatggcagtggaagatacatctctgctgctccaggcgctgaagccaagtaccgcagtgcaagcagcgcctccagcctcttcagcccgagcagcactcttttctcttcctctcgtttgcgatatggaatgtctgatgtcatgccttctggcaggagcaggcttttggaagattttcgaaacaaccggtaccccaatttacaactgcgggagattgctggacatataatggaattttcccaagaccagcatgggtccagattcattcagctgaaactggagcgtgccacaccagctgagcgccagcttgtcttcaatgaaatcctccaggctgcctaccaactcatggtggatgtgtttggtaattacgtcattcagaagttctttgaatttggcagtcttgaacagaagctggctttggcagaacggattcgaggccacgtcctgtcattggcactacagatgtatggctgccgtgttatccagaaagctcttgagtttattccttcagaccagcagaatgagatggttcgggaactagatggccatgtcttgaagtgtgtgaaagatcagaatggcaatcacgtggttcagaaatgcattgaatgtgtacagccccagtctttgcaatttatcatcgatgcgtttaagggacaggtatttgccttatccacacatccttatggctgccgagtgattcagagaatcctggagcactgtctccctgaccagacactccctattttagaggagcttcaccagcacacagagcagcttgtacaggatcaatatggaaattatgtaatccaacatgtactggagcacggtcgtcctgaggataaaagcaaaattgtagcagaaatccgaggcaatgtacttgtattgagtcagcacaaatttgcaagcaatgttgtggagaagtgtgttactcacgcctcacgtacggagcgcgctgtgctcatcgatgaggtgtgcaccatgaacgacggtccccacagtgccttatacaccatgatgaaggaccagtatgccaactacgtggtccagaagatgattgacgtggcggagccaggccagcggaagatcgtcatgcataagatccggccccacatcgcaactcttcgtaagtacacctatggcaagcacattctggccaagctggagaagtactacatgaagaacggtgttgacttagggcccatctgtggcccccctaatggtatcatctgaggcagtgtcacccgctgttccctcattcccgctgacctcactggcccactggcaaatccaaccagcaaccagaaatgttctagtgtagagtctgagacgggcaagtggttgctccaggattactccctcctccaaaaaaggaatcaaatccacgagtggaaaagcctttgtaaatttaattttattacacataacatgtactattttttttaattgactaattgccctgctgttttactggtgtataggatacttgtacataggtaaccaatgtacatgggaggccacatattttgttcactgttgtatctatatttcacatgtggaaactttcagggtggttggtttaacaaaaaaaaaaagctttaaaaaaaaaagaaaaaaaggaaaaggtttttagctcatttgcctggccggcaagttttgcaaatagctcttccccacctcctcattttagtaaaaaacaaacaaaaacaaaaaaacctgagaagtttgaattgtagttaaatgaccccaaactggcatttaacactgtttataaaaaatatatatatatatatatatatataatgaaaaaggtttcagagttgctaaagcttcagtttgtgacattaagtttatgaaattctaaaaaatgccttttttggagactatattatgctgaagaaggctgttcgtgaggaggagatgcgagcacccagaacgtcttttgaggctgggcgggtgtgattgtttactgcctactggatttttttctattaacattgaaaggtaaaatctgattatttagcatgagaaaaaaaaatccaactctgcttttggtcttgcttctataaatatatagtgtatacttggtgtagactttgcatatatacaaatttgtagtattttcttgttttgatgtctaatctgtatctataatgtaccctagtagtcgaacatacttttgattgtacaattgtacatttgtatacctgtaatgtaaatgtggagaagtttgaatcaacataaacacgttttttggtaagaaaagagaattagccagccctgtgcattcagtgtatattctcaccttttatggtcgtagcatatagtgttgtatattgtaaattgtaatttcaaccagaagtaaatttttttcttttgaaggaataaatgttctttatacagcctagttaatgtttaaaaagaaaaaaatagcttggttttatttgtcatctagtctcaagtatagcgagattctttctaaatgttattcaagattgagttctcactagtgtttttttaatcctaaaaaagtaatgttttgattttgtgacagtcaaaaggacgtgcaaaagtctagccttgcccgagctttccttacaatcagagcccctctcaccttgtaaaaaacctgtgtatgcttatgcctgggcaactattttttgtaactcttgtgtagattgtctctaaacaatgtgtgatctttattttgaaaaatacagaactttggaatctg

SEQ ID NO: 67 - DNA, 355 bp, Homo sapiens
cgacaaaggtgaaaagaagaacaagggtacgtttgatggagataagctaggagatttgaaggaggagggtgatgtgatggacaagaccaatggtttaccagtgcagaatgggattgatgcagacgtcaaagattttagggtttgtatgttttacacttctgatttttgaatatgggctatgggattttgtttgttttgatttagttttactttgattttcgttttcttcccctcttcatgttttctttttaagaatccaatctagtgtaggctatgctacaaagattgtaaattaactggtgaggtggaattttctaaaaggtgtcaatgcctgaagcgttgccaaaatgataga

SEQ ID NO: 68 - DNA, 5175 bp, Homo sapiens
atgttgtcggagtgaaaggtaagggggagcgagagcgccagagagagaagatcggggggctgaaatccatcttcatcctaccgctccgcccgtgttggtggaatgagcgttgcatgtgtcttgaagagaaaagcagtgctttggcaggactctttcagcccccacctgaaacatcaccctcaagaaccagctaatcccaacatgcctgttgttttgacatctggaacagggtcgcaagcgcagccacaaccagctgcaaatcaggctcttgcagctgggactcactccagccctgtcccaggatctataggagttgcaggccgttcccaggacgacgctatggtggactacttctttcagaggcagcatggtgagcagcttgggggaggaggaagtggaggaggcggctataataatagcaaacatcgatggcctactggggataacattcatgcagaacatcaggtgcgttccatggatgaactgaatcatgattttcaagcacttgctctggagggaagagcgatgggagagggcccaagggatgcagacagtgatgaaaacgacaaaggtgaaaagaagaacaagggtacgtttgatggagataagctaggagatttgaaggaggagggtgatgtgatggacaagaccaatggtttaccagtgcagaatgggattgatgcagacgtcaaagattttagccgtacccctggtaattgccagaactctgctaatgaagtggatcttctgggtccaaaccagaatggttctgagggcttagcccagctgaccagcaccaatggtgccaagcctgtggaggatttctccaacatggagtcccagagtgtccccttggaccccatggaacatgtgggcatggagcctcttcagtttgattattcaggcacgcaggtacctgtggactcagcagcagcaactgtgggactttttgactacaattctcaacaacagctgttccaaagacctaatgcgcttgctgtccagcagttgacagctgctcagcagcagcagtatgcactggcagctgctcatcagccgcacatcggtttagctcccgctgcgtttgtccccaatccatacatcatcagcgctgctcccccagggacggacccctacacagctggattggctgcagcagcgacactaggcccagctgtggtccctcaccagtattatggagttactccctggggagtctaccctgccagtcttttccagcagcaagctgccgctgccgctgcagcaactaattcagctaatcaacagaccaccccacaggctcagcaaggacagcagcaggttctccgtggaggagccagccaacgtcctttgaccccaaaccagaaccagcagggacagcaaacggatccccttgtggcagctgcagcagtgaattctgcccttgcatttggacaaggtctggcagcaggcatgccaggttatccggtgttggctcctgctgcttactatgaccaaactggtgcccttgtagtgaatgcaggcgcgagaaatggtcttggagctcctgttcgacttgtagctcctgccccagtcatcattagttcctcagctgcacaagcagctgttgcagcagccgcagcttcagcaaatggagcagctggtggtcttgctggaacaacaaatggaccatttcgccctttaggaacacagcagcctcagccccagccccagcagcagcccaataacaacctggcatccagttctttctacggcaacaactctctgaacagcaattcacagagcagctccctcttctcccagggctctgcccagcctgccaacacatccttgggattcggaagtagcagttctctcggcgccaccctgggatccgcccttggagggtttggaacagcagttgcaaactccaacactggcagtggctcccgccgtgactccctgactggcagcagtgacctttataagaggacatcgagcagcttgacccccattggacacagtttttataacggccttagcttttcctcctctcctggacccgtgggcatgcctctccctagtcagggaccaggacattcacagacaccacctccttccctctcttcacatggatcctcttcaagcttaaacctgggaggactcacgaatggcagtggaagatacatctctgctgctccaggcgctgaagccaagtaccgcagtgcaagcagcgcctccagcctcttcagcccgagcagcactcttttctcttcctctcgtttgcgatatggaatgtctgatgtcatgccttctggcaggagcaggcttttggaagattttcgaaacaaccggtaccccaatttacaactgcgggagattgctggacatataatggaattttcccaagaccagcatgggtccagattcattcagctgaaactggagcgtgccacaccagctgagcgccagcttgtcttcaatgaaatcctccaggctgcctaccaactcatggtggatgtgtttggtaattacgtcattcagaagttctttgaatttggcagtcttgaacagaagctggctttggcagaacggattcgaggccacgtcctgtcattggcactacagatgtatggctgccgtgttatccagaaagctcttgagtttattccttcagaccagcagaatgagatggttcgggaactagatggccatgtcttgaagtgtgtgaaagatcagaatggcaatcacgtggttcagaaatgcattgaatgtgtacagccccagtctttgcaatttatcatcgatgcgtttaagggacaggtatttgccttatccacacatccttatggctgccgagtgattcagagaatcctggagcactgtctccctgaccagacactccctattttagaggagcttcaccagcacacagagcagcttgtacaggatcaatatggaaattatgtaatccaacatgtactggagcacggtcgtcctgaggataaaagcaaaattgtagcagaaatccgaggcaatgtacttgtattgagtcagcacaaatttgcaagcaatgttgtggagaagtgtgttactcacgcctcacgtacggagcgcgctgtgctcatcgatgaggtgtgcaccatgaacgacggtccccacagtgccttatacaccatgatgaaggaccagtatgccaactacgtggtccagaagatgattgacgtggcggagccaggccagcggaagatcgtcatgcataagatccggccccacatcgcaactcttcgtaagtacacctatggcaagcacattctggccaagctggagaagtactacatgaagaacggtgttgacttagggcccatctgtggcccccctaatggtatcatctgaggcagtgtcacccgctgttccctcattcccgctgacctcactggcccactggcaaatccaaccagcaaccagaaatgttctagtgtagagtctgagacgggcaagtggttgctccaggattactccctcctccaaaaaaggaatcaaatccacgagtggaaaagcctttgtaaatttaattttattacacataacatgtactattttttttaattgactaattgccctgctgttttactggtgtataggatacttgtacataggtaaccaatgtacatgggaggccacatattttgttcactgttgtatctatatttcacatgtggaaactttcagggtggttggtttaacaaaaaaaaaaagctttaaaaaaaaaagaaaaaaaggaaaaggtttttagctcatttgcctggccggcaagttttgcaaatagctcttccccacctcctcattttagtaaaaaacaaacaaaaacaaaaaaacctgagaagtttgaattgtagttaaatgaccccaaactggcatttaacactgtttataaaaaatatatatatatatatatatatataatgaaaaaggtttcagagttgctaaagcttcagtttgtgacattaagtttatgaaattctaaaaaatgccttttttggagactatattatgctgaagaaggctgttcgtgaggaggagatgcgagcacccagaacgtcttttgaggctgggcgggtgtgattgtttactgcctactggatttttttctattaacattgaaaggtaaaatctgattatttagcatgagaaaaaaaaatccaactctgcttttggtcttgcttctataaatatatagtgtatacttggtgtagactttgcatatatacaaatttgtagtattttcttgttttgatgtctaatctgtatctataatgtaccctagtagtcgaacatacttttgattgtacaattgtacatttgtatacctgtaatgtaaatgtggagaagtttgaatcaacataaacacgttttttggtaagaaaagagaattagccagccctgtgcattcagtgtatattctcaccttttatggtcgtagcatatagtgttgtatattgtaaattgtaatttcaaccagaagtaaatttttttcttttgaaggaataaatgttctttatacagcctagttaatgtttaaaaagaaaaaaatagcttggttttatttgtcatctagtctcaagtatagcgagattctttctaaatgttattcaagattgagttctcactagtgtttttttaatcctaaaaaagtaatgttttgattttgtgacagtcaaaaggacgtgcaaaagtctagccttgcccgagctttccttacaatcagagcccctctcaccttgtaaagtgtgaatcgcccttcccttttgtacagaagatgaactgtattttgcattttgtctacttgtaagtgaatgtaacatactgtcaattttccttgtttgaatatagaattgtaacactacacggtgtacatttccagagccttgtgtatatttccaatgaacttttttgcaagcacacttgtaaccatatgtgtataattaacaaacctgtgtatgcttatgcctgggcaactattttttgtaactcttgtgtagattgtctctaaacaatgtgtgatctttattttgaaaaatacagaactttggaatctgaaaaaaaaaaaaaaaaaaaaaaaamaamaaaaasaaaaaacaaaacaaaaacarrmaamaraaamaaacacaaaaraaarammaaaacacaacaaca

SEQ ID NO: 69 - DNA, 5078 bp, Homo sapiens
atgttgtcggagtgaaaggtaagggggagcgagagcgccagagagagaagatcggggggctgaaatccatcttcatcctaccgctccgcccgtgttggtggaatgagcgttgcatgtgtcttgaagagaaaagcagtgctttggcaggactctttcagcccccacctgaaacatcaccctcaagaaccagctaatcccaacatgcctgttgttttgacatctggaacagggtcgcaagcgcagccacaaccagctgcaaatcaggctcttgcagctgggactcactccagccctgtcccaggatctataggagttgcaggccgttcccaggacgacgctatggtggactacttctttcagaggcagcatggtgagcagcttgggggaggaggaagtggaggaggcggctataataatagcaaacatcgatggcctactggggataacattcatgcagaacatcaggtgcgttccatggatgaactgaatcatgattttcaagcacttgctctggagggaagagcgatgggagagggcccaagggatgcagacagtgatgaaaacgacaaaggtgaaaagaagaacaagggtacgtttgatggagataagctaggagatttgaaggaggagggtgatgtgatggacaagaccaatggtttaccagtgcagaatgggattgatgcagacgtcaaagattttagccgtacccctggtaattgccagaactctgctaatgaagtggatcttctgggtccaaaccagaatggttctgagggcttagcccagctgaccagcaccaatggtgccaagcctgtggaggatttctccaacatggagtcccagagtgtccccttggaccccatggaacatgtgggcatggagcctcttcagtttgattattcaggcacgcaggtacctgtggactcagcagcagcaactgtgggactttttgactacaattctcaacaacagctgttccaaagacctaatgcgcttgctgtccagcagttgacagctgctcagcagcagcagtatgcactggcagctgctcatcagccgcacatcggtttagctcccgctgcgtttgtccccaatccatacatcatcagcgctgctcccccagggacggacccctacacagctggattggctgcagcagcgacactaggcccagctgtggtccctcaccagtattatggagttactccctggggagtctaccctgccagtcttttccagcagcaagctgccgctgccgctgcagcaactaattcagctaatcaacagaccaccccacaggctcagcaaggacagcagcaggttctccgtggaggagccagccaacgtcctttgaccccaaaccagaaccagcagggacagcaaacggatccccttgtggcagctgcagcagtgaattctgcccttgcatttggacaaggtctggcagcaggcatgccaggttatccggtgttggctcctgctgcttactatgaccaaactggtgcccttgtagtgaatgcaggcgcgagaaatggtcttggagctcctgttcgacttgtagctcctgccccagtcatcattagttcctcagctgcacaagcagctgttgcagcagccgcagcttcagcaaatggagcagctggtggtcttgctggaacaacaaatggaccatttcgccctttaggaacacagcagcctcagccccagccccagcagcagcccaataacaacctggcatccagttctttctacggcaacaactctctgaacagcaattcacagagcagctccctcttctcccagggctctgcccagcctgccaacacatccttgggattcggaagtagcagttctctcggcgccaccctgggatccgcccttggagggtttggaacagcagttgcaaactccaacactggcagtggctcccgccgtgactccctgactggcagcagtgacctttataagaggacatcgagcagcttgacccccattggacacagtttttataacggccttagcttttcctcctctcctggacccgtgggcatgcctctccctagtcagggaccaggacattcacagacaccacctccttccctctcttcacatggatcctcttcaagcttaaacctgggaggactcacgaatggcagtggaagatacatctctgctgctccaggcgctgaagccaagtaccgcagtgcaagcagcgcctccagcctcttcagcccgagcagcactcttttctcttcctctcgtttgcgatatggaatgtctgatgtcatgccttctggcaggagcaggcttttggaagattttcgaaacaaccggtaccccaatttacaactgcgggagattgctggacatataatggaattttcccaagaccagcatgggtccagattcattcagctgaaactggagcgtgccacaccagctgagcgccagcttgtcttcaatgaaatcctccaggctgcctaccaactcatggtggatgtgtttggtaattacgtcattcagaagttctttgaatttggcagtcttgaacagaagctggctttggcagaacggattcgaggccacgtcctgtcattggcactacagatgtatggctgccgtgttatccagaaagctcttgagtttattccttcagaccagcagaatgagatggttcgggaactagatggccatgtcttgaagtgtgtgaaagatcagaatggcaatcacgtggttcagaaatgcattgaatgtgtacagccccagtctttgcaatttatcatcgatgcgtttaagggacaggtatttgccttatccacacatccttatggctgccgagtgattcagagaatcctggagcactgtctccctgaccagacactccctattttagaggagcttcaccagcacacagagcagcttgtacaggatcaatatggaaattatgtaatccaacatgtactggagcacggtcgtcctgaggataaaagcaaaattgtagcagaaatccgaggcaatgtacttgtattgagtcagcacaaatttgcaagcaatgttgtggagaagtgtgttactcacgcctcacgtacggagcgcgctgtgctcatcgatgaggtgtgcaccatgaacgacggtccccacagtgccttatacaccatgatgaaggaccagtatgccaactacgtggtccagaagatgattgacgtggcggagccaggccagcggaagatcgtcatgcataagatccggccccacatcgcaactcttcgtaagtacacctatggcaagcacattctggccaagctggagaagtactacatgaagaacggtgttgacttagggcccatctgtggcccccctaatggtatcatctgaggcagtgtcacccgctgttccctcattcccgctgacctcactggcccactggcaaatccaaccagcaaccagaaatgttctagtgtagagtctgagacgggcaagtggttgctccaggattactccctcctccaaaaaaggaatcaaatccacgagtggaaaagcctttgtaaatttaattttattacacataacatgtactattttttttaattgactaattgccctgctgttttactggtgtataggatacttgtacataggtaaccaatgtacatgggaggccacatattttgttcactgttgtatctatatttcacatgtggaaactttcagggtggttggtttaacaaaaaaaaaaagctttaaaaaaaaaagaaaaaaaggaaaaggtttttagctcatttgcctggccggcaagttttgcaaatagctcttccccacctcctcattttagtaaaaaacaaacaaaaacaaaaaaacctgagaagtttgaattgtagttaaatgaccccaaactggcatttaacactgtttataaaaaatatatatatatatatatatatataatgaaaaaggtttcagagttgctaaagcttcagtttgtgacattaagtttatgaaattctaaaaaatgccttttttggagactatattatgctgaagaaggctgttcgtgaggaggagatgcgagcacccagaacgtcttttgaggctgggcgggtgtgattgtttactgcctactggatttttttctattaacattgaaaggtaaaatctgattatttagcatgagaaaaaaaaatccaactctgcttttggtcttgcttctataaatatatagtgtatacttggtgtagactttgcatatatacaaatttgtagtattttcttgttttgatgtctaatctgtatctataatgtaccctagtagtcgaacatacttttgattgtacaattgtacatttgtatacctgtaatgtaaatgtggagaagtttgaatcaacataaacacgttttttggtaagaaaagagaattagccagccctgtgcattcagtgtatattctcaccttttatggtcgtagcatatagtgttgtatattgtaaattgtaatttcaaccagaagtaaatttttttcttttgaaggaataaatgttctttatacagcctagttaatgtttaaaaagaaaaaaatagcttggttttatttgtcatctagtctcaagtatagcgagattctttctaaatgttattcaagattgagttctcactagtgtttttttaatcctaaaaaagtaatgttttgattttgtgacagtcaaaaggacgtgcaaaagtctagccttgcccgagctttccttacaatcagagcccctctcaccttgtaaagtgtgaatcgcccttcccttttgtacagaagatgaactgtattttgcattttgtctacttgtaagtgaatgtaacatactgtcaattttccttgtttgaatatagaattgtaacactacacggtgtacatttccagagccttgtgtatatttccaatgaacttttttgcaagcacacttgtaaccatatgtgtataattaacaaacctgtgtatgcttatgcctgggcaactattttttgtaactcttgtgtagattgtctctaaacaatgtgtgatctttattttgaaaaatacagaactttggaatctg

SEQ ID NO: 70 - DNA, 268 bp, Homo sapiens
cgttcccaggacgacgctatggtggactacttctttcagaggcagcatggtgagcagcttgggggaggaggaagtggaggaggcggctataataatagcaaacatcgatggcctactggggataacattcatgcagaacatcagaggtaaaaaaaagttcactattttagctttgacattcctttataatcactgtccacttaggatatctgctttcaatgaatgtctttaaaaacttaaattgctgatttcatttggtacaaacagt

SEQ ID NO: 71 - DNA, 4876 bp, Homo sapiens
atgttgtcggagtgaaaggtaagggggagcgagagcgccagagagagaagatcggggggctgaaatccatcttcatcctaccgctccgcccgtgttggtggaatgagcgttgcatgtgtcttgaagagaaaagcagtgctttggcaggactctttcagcccccacctgaaacatcaccctcaagaaccagctaatcccaacatgcctgttgttttgacatctggaacagggtcgcaagcgcagccacaaccagctgcaaatcaggctcttgcagctgggactcactccagccctgtcccaggatctataggagttgcaggccgttcccaggacgacgctatggtggactacttctttcagaggcagcatggtgagcagcttgggggaggaggaagtggaggaggcggctataataatagcaaacatcgatggcctactggggataacattcatgcagaacatcaggtgcgttccatggatgaactgaatcatgattttcaagcacttgctctggagggaagagcgatgggagagggcccaagggatgcagacagtgatgaaaacgacaaaggtgaaaagaagaacaagggtacgtttgatggagataagctaggagatttgaaggaggagggtgatgtgatggacaagaccaatggtttaccagtgcagaatgggattgatgcagacgtcaaagattttagccgtacccctggtaattgccagaactctgctaatgaagtggatcttctgggtccaaaccagaatggttctgagggcttagcccagctgaccagcaccaatggtgccaagcctgtggaggatttctccaacatggagtcccagagtgtccccttggaccccatggaacatgtgggcatggagcctcttcagtttgattattcaggcacgcaggtacctgtggactcagcagcagcaactgtgggactttttgactacaattctcaacaacagctgttccaaagacctaatgcgcttgctgtccagcagttgacagctgctcagcagcagcagtatgcactggcagctgctcatcagccgcacatcggtttagctcccgctgcgtttgtccccaatccatacatcatcagcgctgctcccccagggacggacccctacacagctggattggctgcagcagcgacactaggcccagctgtggtccctcaccagtattatggagttactccctggggagtctaccctgccagtcttttccagcagcaagctgccgctgccgctgcagcaactaattcagctaatcaacagaccaccccacaggctcagcaaggacagcagcaggttctccgtggaggagccagccaacgtcctttgaccccaaaccagaaccagcagggacagcaaacggatccccttgtggcagctgcagcagtgaattctgcccttgcatttggacaaggtctggcagcaggcatgccaggttatccggtgttggctcctgctgcttactatgaccaaactggtgcccttgtagtgaatgcaggcgcgagaaatggtcttggagctcctgttcgacttgtagctcctgccccagtcatcattagttcctcagctgcacaagcagctgttgcagcagccgcagcttcagcaaatggagcagctggtggtcttgctggaacaacaaatggaccatttcgccctttaggaacacagcagcctcagccccagccccagcagcagcccaataacaacctggcatccagttctttctacggcaacaactctctgaacagcaattcacagagcagctccctcttctcccagggctctgcccagcctgccaacacatccttgggattcggaagtagcagttctctcggcgccaccctgggatccgcccttggagggtttggaacagcagttgcaaactccaacactggcagtggctcccgccgtgactccctgactggcagcagtgacctttataagaggacatcgagcagcttgacccccattggacacagtttttataacggccttagcttttcctcctctcctggacccgtgggcatgcctctccctagtcagggaccaggacattcacagacaccacctccttccctctcttcacatggatcctcttcaagcttaaacctgggaggactcacgaatggcagtggaagatacatctctgctgctccaggcgctgaagccaagtaccgcagtgcaagcagcgcctccagcctcttcagcccgagcagcactcttttctcttcctctcgtttgcgatatggaatgtctgatgtcatgccttctggcaggagcaggcttttggaagattttcgaaacaaccggtaccccaatttacaactgcgggagattgctggacatataatggaattttcccaagaccagcatgggtccagattcattcagctgaaactggagcgtgccacaccagctgagcgccagcttgtcttcaatgaaatcctccaggctgcctaccaactcatggtggatgtgtttggtaattacgtcattcagaagttctttgaatttggcagtcttgaacagaagctggctttggcagaacggattcgaggccacgtcctgtcattggcactacagatgtatggctgccgtgttatccagaaagctcttgagtttattccttcagaccagcagaatgagatggttcgggaactagatggccatgtcttgaagtgtgtgaaagatcagaatggcaatcacgtggttcagaaatgcattgaatgtgtacagccccagtctttgcaatttatcatcgatgcgtttaagggacaggtatttgccttatccacacatccttatggctgccgagtgattcagagaatcctggagcactgtctccctgaccagacactccctattttagaggagcttcaccagcacacagagcagcttgtacaggatcaatatggaaattatgtaatccaacatgtactggagcacggtcgtcctgaggataaaagcaaaattgtagcagaaatccgaggcaatgtacttgtattgagtcagcacaaatttgcaagcaatgttgtggagaagtgtgttactcacgcctcacgtacggagcgcgctgtgctcatcgatgaggtgtgcaccatgaacgacggtccccacagtgccttatacaccatgatgaaggaccagtatgccaactacgtggtccagaagatgattgacgtggcggagccaggccagcggaagatcgtcatgcataagatccggccccacatcgcaactcttcgtaagtacacctatggcaagcacattctggccaagctggagaagtactacatgaagaacggtgttgacttagggcccatctgtggcccccctaatggtatcatctgaggcagtgtcacccgctgttccctcattcccgctgacctcactggcccactggcaaatccaaccagcaaccagaaatgttctagtgtagagtctgagacgggcaagtggttgctccaggattactccctcctccaaaaaaggaatcaaatccacgagtggaaaagcctttgtaaatttaattttattacacataacatgtactattttttttaattgactaattgccctgctgttttactggtgtataggatacttgtacataggtaaccaatgtacatgggaggccacatattttgttcactgttgtatctatatttcacatgtggaaactttcagggtggttggtttaacaaaaaaaaaaagctttaaaaaaaaaagaaaaaaaggaaaaggtttttagctcatttgcctggccggcaagttttgcaaatagctcttccccacctcctcattttagtaaaaaacaaacaaaaacaaaaaaacctgagaagtttgaattgtagttaaatgaccccaaactggcatttaacactgtttataaaaaatatatatatatatatatatatataatgaaaaaggtttcagagttgctaaagcttcagtttgtgacattaagtttatgaaattctaaaaaatgccttttttggagactatattatgctgaagaaggctgttcgtgaggaggagatgcgagcacccagaacgtcttttgaggctgggcgggtgtgattgtttactgcctactggatttttttctattaacattgaaaggtaaaatctgattatttagcatgagaaaaaaaaatccaactctgcttttggtcttgcttctataaatatatagtgtatacttggtgtagactttgcatatatacaaatttgtagtattttcttgttttgatgtctaatctgtatctataatgtaccctagtagtcgaacatacttttgattgtacaattgtacatttgtatacctgtaatgtaaatgtggagaagtttgaatcaacataaacacgttttttggtaagaaaagagaattagccagccctgtgcattcagtgtatattctcaccttttatggtcgtagcatatagtgttgtatattgtaaattgtaatttcaaccagaagtaaatttttttcttttgaaggaataaatgttctttatacagcctagttaatgtttaaaaagaaaaaaatagcttggttttatttgtcatctagtctcaagtatagcgagattctttctaaatgttattcaagattgagttctcactagtgtttttttaatcctaaaaaagtaatgttttgattttgtgacagtcaaaaggacgtgcaaaagtctagccttgcccgagctttccttacaatcagagcccctctcaccttgtaaaaaacctgtgtatgcttatgcctgggcaactattttttgtaactcttgtgtagattgtctctaaacaatgtgtgatctttattttgaaaaatacagaactttggaatctg

SEQ ID NO: 72 - DNA, 5164 bp, Homo sapiens
atgttgtcggagtgaaaggtaagggggagcgagagcgccagagagagaagatcggggggctgaaatccatcttcatcctaccgctccgcccgtgttggtggaatgagcgttgcatgtgtcttgaagagaaaagcagtgctttggcaggactctttcagcccccacctgaaacatcaccctcaagaaccagctaatcccaacatgcctgttgttttgacatctggaacagggtcgcaagcgcagccacaaccagctgcaaatcaggctcttgcagctgggactcactccagccctgtcccaggatctataggagttgcaggccgttcccaggacgacgctatggtggactacttctttcagaggcagcatggtgagcagcttgggggaggaggaagtggaggaggcggctataataatagcaaacatcgatggcctactggggataacattcatgcagaacatcaggtgcgttccatggatgaactgaatcatgattttcaagcacttgctctggagggaagagcgatgggagagcagctcttgccaggtaaaaagttttgggaaacagatgaatccagcaaagatggaccaaaaggaatattcctgggtgatcaatggcgagacagtgcctggggaacatcagatcattcagtttcccagccaatcatggtgcagagaagacctggtcagagtttccatgtgaacagtgaggtcaattctgtactgtccccacgatcggagagtgggggactaggcgttagcatggtggagtatgtgttgagctcatccccgggcgattcctgtctaagaaaaggaggatttggcccaagggatgcagacagtgatgaaaacgacaaaggtgaaaagaagaacaagggtacgtttgatggagataagctaggagatttgaaggaggagggtgatgtgatggacaagaccaatggtttaccagtgcagaatgggattgatgcagacgtcaaagattttagccgtacccctggtaattgccagaactctgctaatgaagtggatcttctgggtccaaaccagaatggttctgagggcttagcccagctgaccagcaccaatggtgccaagcctgtggaggatttctccaacatggagtcccagagtgtccccttggaccccatggaacatgtgggcatggagcctcttcagtttgattattcaggcacgcaggtacctgtggactcagcagcagcaactgtgggactttttgactacaattctcaacaacagctgttccaaagacctaatgcgcttgctgtccagcagttgacagctgctcagcagcagcagtatgcactggcagctgctcatcagccgcacatcggtttagctcccgctgcgtttgtccccaatccatacatcatcagcgctgctcccccagggacggacccctacacagctggattggctgcagcagcgacactaggcccagctgtggtccctcaccagtattatggagttactccctggggagtctaccctgccagtcttttccagcagcaagctgccgctgccgctgcagcaactaattcagctaatcaacagaccaccccacaggctcagcaaggacagcagcaggttctccgtggaggagccagccaacgtcctttgaccccaaaccagaaccagcagggacagcaaacggatccccttgtggcagctgcagcagtgaattctgcccttgcatttggacaaggtctggcagcaggcatgccaggttatccggtgttggctcctgctgcttactatgaccaaactggtgcccttgtagtgaatgcaggcgcgagaaatggtcttggagctcctgttcgacttgtagctcctgccccagtcatcattagttcctcagctgcacaagcagctgttgcagcagccgcagcttcagcaaatggagcagctggtggtcttgctggaacaacaaatggaccatttcgccctttaggaacacagcagcctcagccccagccccagcagcagcccaataacaacctggcatccagttctttctacggcaacaactctctgaacagcaattcacagagcagctccctcttctcccagggctctgcccagcctgccaacacatccttgggattcggaagtagcagttctctcggcgccaccctgggatccgcccttggagggtttggaacagcagttgcaaactccaacactggcagtggctcccgccgtgactccctgactggcagcagtgacctttataagaggacatcgagcagcttgacccccattggacacagtttttataacggccttagcttttcctcctctcctggacccgtgggcatgcctctccctagtcagggaccaggacattcacagacaccacctccttccctctcttcacatggatcctcttcaagcttaaacctgggaggactcacgaatggcagtggaagatacatctctgctgctccaggcgctgaagccaagtaccgcagtgcaagcagcgcctccagcctcttcagcccgagcagcactcttttctcttcctctcgtttgcgatatggaatgtctgatgtcatgccttctggcaggagcaggcttttggaagattttcgaaacaaccggtaccccaatttacaactgcgggagattgctggacatataatggaattttcccaagaccagcatgggtccagattcattcagctgaaactggagcgtgccacaccagctgagcgccagcttgtcttcaatgaaatcctccaggctgcctaccaactcatggtggatgtgtttggtaattacgtcattcagaagttctttgaatttggcagtcttgaacagaagctggctttggcagaacggattcgaggccacgtcctgtcattggcactacagatgtatggctgccgtgttatccagaaagctcttgagtttattccttcagaccagcagaatgagatggttcgggaactagatggccatgtcttgaagtgtgtgaaagatcagaatggcaatcacgtggttcagaaatgcattgaatgtgtacagccccagtctttgcaatttatcatcgatgcgtttaagggacaggtatttgccttatccacacatccttatggctgccgagtgattcagagaatcctggagcactgtctccctgaccagacactccctattttagaggagcttcaccagcacacagagcagcttgtacaggatcaatatggaaattatgtaatccaacatgtactggagcacggtcgtcctgaggataaaagcaaaattgtagcagaaatccgaggcaatgtacttgtattgagtcagcacaaatttgcaagcaatgttgtggagaagtgtgttactcacgcctcacgtacggagcgcgctgtgctcatcgatgaggtgtgcaccatgaacgacggtccccacagtgccttatacaccatgatgaaggaccagtatgccaactacgtggtccagaagatgattgacgtggcggagccaggccagcggaagatcgtcatgcataagatccggccccacatcgcaactcttcgtaagtacacctatggcaagcacattctggccaagctggagaagtactacatgaagaacggtgttgacttagggcccatctgtggcccccctaatggtatcatctgaggcagtgtcacccgctgttccctcattcccgctgacctcactggcccactggcaaatccaaccagcaaccagaaatgttctagtgtagagtctgagacgggcaagtggttgctccaggattactccctcctccaaaaaaggaatcaaatccacgagtggaaaagcctttgtaaatttaattttattacacataacatgtactattttttttaattgactaattgccctgctgttttactggtgtataggatacttgtacataggtaaccaatgtacatgggaggccacatattttgttcactgttgtatctatatttcacatgtggaaactttcagggtggttggtttaacaaaaaaaaaaagctttaaaaaaaaaagaaaaaaaggaaaaggtttttagctcatttgcctggccggcaagttttgcaaatagctcttccccacctcctcattttagtaaaaaacaaacaaaaacaaaaaaacctgagaagtttgaattgtagttaaatgaccccaaactggcatttaacactgtttataaaaaatatatatatatatatatatatataatgaaaaaggtttcagagttgctaaagcttcagtttgtgacattaagtttatgaaattctaaaaaatgccttttttggagactatattatgctgaagaaggctgttcgtgaggaggagatgcgagcacccagaacgtcttttgaggctgggcgggtgtgattgtttactgcctactggatttttttctattaacattgaaaggtaaaatctgattatttagcatgagaaaaaaaaatccaactctgcttttggtcttgcttctataaatatatagtgtatacttggtgtagactttgcatatatacaaatttgtagtattttcttgttttgatgtctaatctgtatctataatgtaccctagtagtcgaacatacttttgattgtacaattgtacatttgtatacctgtaatgtaaatgtggagaagtttgaatcaacataaacacgttttttggtaagaaaagagaattagccagccctgtgcattcagtgtatattctcaccttttatggtcgtagcatatagtgttgtatattgtaaattgtaatttcaaccagaagtaaatttttttcttttgaaggaataaatgttctttatacagcctagttaatgtttaaaaagaaaaaaatagcttggttttatttgtcatctagtctcaagtatagcgagattctttctaaatgttattcaagattgagttctcactagtgtttttttaatcctaaaaaagtaatgttttgattttgtgacagtcaaaaggacgtgcaaaagtctagccttgcccgagctttccttacaatcagagcccctctcaccttgtaaaaaacctgtgtatgcttatgcctgggcaactattttttgtaactcttgtgtagattgtctctaaacaatgtgtgatctttattttgaaaaatacagaactttggaatctg

SEQ ID NO: 73 - DNA, 5382 bp, Homo sapiens
atgttgtcggagtgaaaggtaagggggagcgagagcgccagagagagaagatcggggggctgaaatccatcttcatcctaccgctccgcccgtgttggtggaatgagcgttgcatgtgtcttgaagagaaaagcagtgctttggcaggactctttcagcccccacctgaaacatcaccctcaagaaccagctaatcccaacatgcctgttgttttgacatctggaacagggtcgcaagcgcagccacaaccagctgcaaatcaggctcttgcagctgggactcactccagccctgtcccaggatctataggagttgcaggccgttcccaggacgacgctatggtggactacttctttcagaggcagcatggtgagcagcttgggggaggaggaagtggaggaggcggctataataatagcaaacatcgatggcctactggggataacattcatgcagaacatcaggtgcgttccatggatgaactgaatcatgattttcaagcacttgctctggagggaagagcgatgggagagcagctcttgccaggtaaaaagttttgggaaacagatgaatccagcaaagatggaccaaaaggaatattcctgggtgatcaatggcgagacagtgcctggggaacatcagatcattcagtttcccagccaatcatggtgcagagaagacctggtcagagtttccatgtgaacagtgaggtcaattctgtactgtccccacgatcggagagtgggggactaggcgttagcatggtggagtatgtgttgagctcatccccgggcgattcctgtctaagaaaaggaggatttggcccaagggatgcagacagtgatgaaaacgacaaaggtgaaaagaagaacaagggtacgtttgatggagataagctaggagatttgaaggaggagggtgatgtgatggacaagaccaatggtttaccagtgcagaatgggattgatgcagacgtcaaagattttagccgtacccctggtaattgccagaactctgctaatgaagtggatcttctgggtccaaaccagaatggttctgagggcttagcccagctgaccagcaccaatggtgccaagcctgtggaggatttctccaacatggagtcccagagtgtccccttggaccccatggaacatgtgggcatggagcctcttcagtttgattattcaggcacgcaggtacctgtggactcagcagcagcaactgtgggactttttgactacaattctcaacaacagctgttccaaagacctaatgcgcttgctgtccagcagttgacagctgctcagcagcagcagtatgcactggcagctgctcatcagccgcacatcggtttagctcccgctgcgtttgtccccaatccatacatcatcagcgctgctcccccagggacggacccctacacagctggattggctgcagcagcgacactaggcccagctgtggtccctcaccagtattatggagttactccctggggagtctaccctgccagtcttttccagcagcaagctgccgctgccgctgcagcaactaattcagctaatcaacagaccaccccacaggctcagcaaggacagcagcaggttctccgtggaggagccagccaacgtcctttgaccccaaaccagaaccagcagggacagcaaacggatccccttgtggcagctgcagcagtgaattctgcccttgcatttggacaaggtctggcagcaggcatgccaggttatccggtgttggctcctgctgcttactatgaccaaactggtgcccttgtagtgaatgcaggcgcgagaaatggtcttggagctcctgttcgacttgtagctcctgccccagtcatcattagttcctcagctgcacaagcaggaacacagcagcctcagccccagccccagcagcagcccaataacaacctggcatccagttctttctacggcaacaactctctgaacagcaattcacagagcagctccctcttctcccagggctctgcccagcctgccaacacatccttgggattcggaagtagcagttctctcggcgccaccctgggatccgcccttggagggtttggaacagcagttgcaaactccaacactggcagtggctcccgccgtgactccctgactggcagcagtgacctttataagaggacatcgagcagcttgacccccattggacacagtttttataacggccttagcttttcctcctctcctggacccgtgggcatgcctctccctagtcagggaccaggacattcacagacaccacctccttccctctcttcacatggatcctcttcaagcttaaacctgggaggactcacgaatggcagtggaagatacatctctgctgctccaggcgctgaagccaagtaccgcagtgcaagcagcgcctccagcctcttcagcccgagcagcactcttttctcttcctctcgtttgcgatatggaatgtctgatgtcatgccttctggcaggagcaggcttttggaagattttcgaaacaaccggtaccccaatttacaactgcgggagattgctggacatataatggaattttcccaagaccagcatgggtccagattcattcagctgaaactggagcgtgccacaccagctgagcgccagcttgtcttcaatgaaatcctccaggctgcctaccaactcatggtggatgtgtttggtaattacgtcattcagaagttctttgaatttggcagtcttgaacagaagctggctttggcagaacggattcgaggccacgtcctgtcattggcactacagatgtatggctgccgtgttatccagaaagctcttgagtttattccttcagaccagcagaatgagatggttcgggaactagatggccatgtcttgaagtgtgtgaaagatcagaatggcaatcacgtggttcagaaatgcattgaatgtgtacagccccagtctttgcaatttatcatcgatgcgtttaagggacaggtatttgccttatccacacatccttatggctgccgagtgattcagagaatcctggagcactgtctccctgaccagacactccctattttagaggagcttcaccagcacacagagcagcttgtacaggatcaatatggaaattatgtaatccaacatgtactggagcacggtcgtcctgaggataaaagcaaaattgtagcagaaatccgaggcaatgtacttgtattgagtcagcacaaatttgcaagcaatgttgtggagaagtgtgttactcacgcctcacgtacggagcgcgctgtgctcatcgatgaggtgtgcaccatgaacgacggtccccacagtgccttatacaccatgatgaaggaccagtatgccaactacgtggtccagaagatgattgacgtggcggagccaggccagcggaagatcgtcatgcataagatccggccccacatcgcaactcttcgtaagtacacctatggcaagcacattctggccaagctggagaagtactacatgaagaacggtgttgacttagggcccatctgtggcccccctaatggtatcatctgaggcagtgtcacccgctgttccctcattcccgctgacctcactggcccactggcaaatccaaccagcaaccagaaatgttctagtgtagagtctgagacgggcaagtggttgctccaggattactccctcctccaaaaaaggaatcaaatccacgagtggaaaagcctttgtaaatttaattttattacacataacatgtactattttttttaattgactaattgccctgctgttttactggtgtataggatacttgtacataggtaaccaatgtacatgggaggccacatattttgttcactgttgtatctatatttcacatgtggaaactttcagggtggttggtttaacaaaaaaaaaaagctttaaaaaaaaaagaaaaaaaggaaaaggtttttagctcatttgcctggccggcaagttttgcaaatagctcttccccacctcctcattttagtaaaaaacaaacaaaaacaaaaaaacctgagaagtttgaattgtagttaaatgaccccaaactggcatttaacactgtttataaaaaatatatatatatatatatatatataatgaaaaaggtttcagagttgctaaagcttcagtttgtgacattaagtttatgaaattctaaaaaatgccttttttggagactatattatgctgaagaaggctgttcgtgaggaggagatgcgagcacccagaacgtcttttgaggctgggcgggtgtgattgtttactgcctactggatttttttctattaacattgaaaggtaaaatctgattatttagcatgagaaaaaaaaatccaactctgcttttggtcttgcttctataaatatatagtgtatacttggtgtagactttgcatatatacaaatttgtagtattttcttgttttgatgtctaatctgtatctataatgtaccctagtagtcgaacatacttttgattgtacaattgtacatttgtatacctgtaatgtaaatgtggagaagtttgaatcaacataaacacgttttttggtaagaaaagagaattagccagccctgtgcattcagtgtatattctcaccttttatggtcgtagcatatagtgttgtatattgtaaattgtaatttcaaccagaagtaaatttttttcttttgaaggaataaatgttctttatacagcctagttaatgtttaaaaagaaaaaaatagcttggttttatttgtcatctagtctcaagtatagcgagattctttctaaatgttattcaagattgagttctcactagtgtttttttaatcctaaaaaagtaatgttttgattttgtgacagtcaaaaggacgtgcaaaagtctagccttgcccgagctttccttacaatcagagcccctctcaccttgtaaagtgtgaatcgcccttcccttttgtacagaagatgaactgtattttgcattttgtctacttgtaagtgaatgtaacatactgtcaattttccttgtttgaatatagaattgtaacactacacggtgtacatttccagagccttgtgtatatttccaatgaacttttttgcaagcacacttgtaaccatatgtgtataattaacaaacctgtgtatgcttatgcctgggcaactattttttgtaactcttgtgtagattgtctctaaacaatgtgtgatctttattttgaaaaatacagaactttggaatctgaaaaaaaaaaaaaaaaaaaaaaaamaamaaaaasaaaaaacaaaacaaaaacarrmaamaraaamaaacacaaaaraaarammaaaacacaacaaca

SEQ ID NO: 74 - DNA, 5285 bp, Homo sapiens
atgttgtcggagtgaaaggtaagggggagcgagagcgccagagagagaagatcggggggctgaaatccatcttcatcctaccgctccgcccgtgttggtggaatgagcgttgcatgtgtcttgaagagaaaagcagtgctttggcaggactctttcagcccccacctgaaacatcaccctcaagaaccagctaatcccaacatgcctgttgttttgacatctggaacagggtcgcaagcgcagccacaaccagctgcaaatcaggctcttgcagctgggactcactccagccctgtcccaggatctataggagttgcaggccgttcccaggacgacgctatggtggactacttctttcagaggcagcatggtgagcagcttgggggaggaggaagtggaggaggcggctataataatagcaaacatcgatggcctactggggataacattcatgcagaacatcaggtgcgttccatggatgaactgaatcatgattttcaagcacttgctctggagggaagagcgatgggagagcagctcttgccaggtaaaaagttttgggaaacagatgaatccagcaaagatggaccaaaaggaatattcctgggtgatcaatggcgagacagtgcctggggaacatcagatcattcagtttcccagccaatcatggtgcagagaagacctggtcagagtttccatgtgaacagtgaggtcaattctgtactgtccccacgatcggagagtgggggactaggcgttagcatggtggagtatgtgttgagctcatccccgggcgattcctgtctaagaaaaggaggatttggcccaagggatgcagacagtgatgaaaacgacaaaggtgaaaagaagaacaagggtacgtttgatggagataagctaggagatttgaaggaggagggtgatgtgatggacaagaccaatggtttaccagtgcagaatgggattgatgcagacgtcaaagattttagccgtacccctggtaattgccagaactctgctaatgaagtggatcttctgggtccaaaccagaatggttctgagggcttagcccagctgaccagcaccaatggtgccaagcctgtggaggatttctccaacatggagtcccagagtgtccccttggaccccatggaacatgtgggcatggagcctcttcagtttgattattcaggcacgcaggtacctgtggactcagcagcagcaactgtgggactttttgactacaattctcaacaacagctgttccaaagacctaatgcgcttgctgtccagcagttgacagctgctcagcagcagcagtatgcactggcagctgctcatcagccgcacatcggtttagctcccgctgcgtttgtccccaatccatacatcatcagcgctgctcccccagggacggacccctacacagctggattggctgcagcagcgacactaggcccagctgtggtccctcaccagtattatggagttactccctggggagtctaccctgccagtcttttccagcagcaagctgccgctgccgctgcagcaactaattcagctaatcaacagaccaccccacaggctcagcaaggacagcagcaggttctccgtggaggagccagccaacgtcctttgaccccaaaccagaaccagcagggacagcaaacggatccccttgtggcagctgcagcagtgaattctgcccttgcatttggacaaggtctggcagcaggcatgccaggttatccggtgttggctcctgctgcttactatgaccaaactggtgcccttgtagtgaatgcaggcgcgagaaatggtcttggagctcctgttcgacttgtagctcctgccccagtcatcattagttcctcagctgcacaagcaggaacacagcagcctcagccccagccccagcagcagcccaataacaacctggcatccagttctttctacggcaacaactctctgaacagcaattcacagagcagctccctcttctcccagggctctgcccagcctgccaacacatccttgggattcggaagtagcagttctctcggcgccaccctgggatccgcccttggagggtttggaacagcagttgcaaactccaacactggcagtggctcccgccgtgactccctgactggcagcagtgacctttataagaggacatcgagcagcttgacccccattggacacagtttttataacggccttagcttttcctcctctcctggacccgtgggcatgcctctccctagtcagggaccaggacattcacagacaccacctccttccctctcttcacatggatcctcttcaagcttaaacctgggaggactcacgaatggcagtggaagatacatctctgctgctccaggcgctgaagccaagtaccgcagtgcaagcagcgcctccagcctcttcagcccgagcagcactcttttctcttcctctcgtttgcgatatggaatgtctgatgtcatgccttctggcaggagcaggcttttggaagattttcgaaacaaccggtaccccaatttacaactgcgggagattgctggacatataatggaattttcccaagaccagcatgggtccagattcattcagctgaaactggagcgtgccacaccagctgagcgccagcttgtcttcaatgaaatcctccaggctgcctaccaactcatggtggatgtgtttggtaattacgtcattcagaagttctttgaatttggcagtcttgaacagaagctggctttggcagaacggattcgaggccacgtcctgtcattggcactacagatgtatggctgccgtgttatccagaaagctcttgagtttattccttcagaccagcagaatgagatggttcgggaactagatggccatgtcttgaagtgtgtgaaagatcagaatggcaatcacgtggttcagaaatgcattgaatgtgtacagccccagtctttgcaatttatcatcgatgcgtttaagggacaggtatttgccttatccacacatccttatggctgccgagtgattcagagaatcctggagcactgtctccctgaccagacactccctattttagaggagcttcaccagcacacagagcagcttgtacaggatcaatatggaaattatgtaatccaacatgtactggagcacggtcgtcctgaggataaaagcaaaattgtagcagaaatccgaggcaatgtacttgtattgagtcagcacaaatttgcaagcaatgttgtggagaagtgtgttactcacgcctcacgtacggagcgcgctgtgctcatcgatgaggtgtgcaccatgaacgacggtccccacagtgccttatacaccatgatgaaggaccagtatgccaactacgtggtccagaagatgattgacgtggcggagccaggccagcggaagatcgtcatgcataagatccggccccacatcgcaactcttcgtaagtacacctatggcaagcacattctggccaagctggagaagtactacatgaagaacggtgttgacttagggcccatctgtggcccccctaatggtatcatctgaggcagtgtcacccgctgttccctcattcccgctgacctcactggcccactggcaaatccaaccagcaaccagaaatgttctagtgtagagtctgagacgggcaagtggttgctccaggattactccctcctccaaaaaaggaatcaaatccacgagtggaaaagcctttgtaaatttaattttattacacataacatgtactattttttttaattgactaattgccctgctgttttactggtgtataggatacttgtacataggtaaccaatgtacatgggaggccacatattttgttcactgttgtatctatatttcacatgtggaaactttcagggtggttggtttaacaaaaaaaaaaagctttaaaaaaaaaagaaaaaaaggaaaaggtttttagctcatttgcctggccggcaagttttgcaaatagctcttccccacctcctcattttagtaaaaaacaaacaaaaacaaaaaaacctgagaagtttgaattgtagttaaatgaccccaaactggcatttaacactgtttataaaaaatatatatatatatatatatatataatgaaaaaggtttcagagttgctaaagcttcagtttgtgacattaagtttatgaaattctaaaaaatgccttttttggagactatattatgctgaagaaggctgttcgtgaggaggagatgcgagcacccagaacgtcttttgaggctgggcgggtgtgattgtttactgcctactggatttttttctattaacattgaaaggtaaaatctgattatttagcatgagaaaaaaaaatccaactctgcttttggtcttgcttctataaatatatagtgtatacttggtgtagactttgcatatatacaaatttgtagtattttcttgttttgatgtctaatctgtatctataatgtaccctagtagtcgaacatacttttgattgtacaattgtacatttgtatacctgtaatgtaaatgtggagaagtttgaatcaacataaacacgttttttggtaagaaaagagaattagccagccctgtgcattcagtgtatattctcaccttttatggtcgtagcatatagtgttgtatattgtaaattgtaatttcaaccagaagtaaatttttttcttttgaaggaataaatgttctttatacagcctagttaatgtttaaaaagaaaaaaatagcttggttttatttgtcatctagtctcaagtatagcgagattctttctaaatgttattcaagattgagttctcactagtgtttttttaatcctaaaaaagtaatgttttgattttgtgacagtcaaaaggacgtgcaaaagtctagccttgcccgagctttccttacaatcagagcccctctcaccttgtaaagtgtgaatcgcccttcccttttgtacagaagatgaactgtattttgcattttgtctacttgtaagtgaatgtaacatactgtcaattttccttgtttgaatatagaattgtaacactacacggtgtacatttccagagccttgtgtatatttccaatgaacttttttgcaagcacacttgtaaccatatgtgtataattaacaaacctgtgtatgcttatgcctgggcaactattttttgtaactcttgtgtagattgtctctaaacaatgtgtgatctttattttgaaaaatacagaactttggaatctg

SEQ ID NO: 75 - DNA, 5083 bp, Homo sapiens
atgttgtcggagtgaaaggtaagggggagcgagagcgccagagagagaagatcggggggctgaaatccatcttcatcctaccgctccgcccgtgttggtggaatgagcgttgcatgtgtcttgaagagaaaagcagtgctttggcaggactctttcagcccccacctgaaacatcaccctcaagaaccagctaatcccaacatgcctgttgttttgacatctggaacagggtcgcaagcgcagccacaaccagctgcaaatcaggctcttgcagctgggactcactccagccctgtcccaggatctataggagttgcaggccgttcccaggacgacgctatggtggactacttctttcagaggcagcatggtgagcagcttgggggaggaggaagtggaggaggcggctataataatagcaaacatcgatggcctactggggataacattcatgcagaacatcaggtgcgttccatggatgaactgaatcatgattttcaagcacttgctctggagggaagagcgatgggagagcagctcttgccaggtaaaaagttttgggaaacagatgaatccagcaaagatggaccaaaaggaatattcctgggtgatcaatggcgagacagtgcctggggaacatcagatcattcagtttcccagccaatcatggtgcagagaagacctggtcagagtttccatgtgaacagtgaggtcaattctgtactgtccccacgatcggagagtgggggactaggcgttagcatggtggagtatgtgttgagctcatccccgggcgattcctgtctaagaaaaggaggatttggcccaagggatgcagacagtgatgaaaacgacaaaggtgaaaagaagaacaagggtacgtttgatggagataagctaggagatttgaaggaggagggtgatgtgatggacaagaccaatggtttaccagtgcagaatgggattgatgcagacgtcaaagattttagccgtacccctggtaattgccagaactctgctaatgaagtggatcttctgggtccaaaccagaatggttctgagggcttagcccagctgaccagcaccaatggtgccaagcctgtggaggatttctccaacatggagtcccagagtgtccccttggaccccatggaacatgtgggcatggagcctcttcagtttgattattcaggcacgcaggtacctgtggactcagcagcagcaactgtgggactttttgactacaattctcaacaacagctgttccaaagacctaatgcgcttgctgtccagcagttgacagctgctcagcagcagcagtatgcactggcagctgctcatcagccgcacatcggtttagctcccgctgcgtttgtccccaatccatacatcatcagcgctgctcccccagggacggacccctacacagctggattggctgcagcagcgacactaggcccagctgtggtccctcaccagtattatggagttactccctggggagtctaccctgccagtcttttccagcagcaagctgccgctgccgctgcagcaactaattcagctaatcaacagaccaccccacaggctcagcaaggacagcagcaggttctccgtggaggagccagccaacgtcctttgaccccaaaccagaaccagcagggacagcaaacggatccccttgtggcagctgcagcagtgaattctgcccttgcatttggacaaggtctggcagcaggcatgccaggttatccggtgttggctcctgctgcttactatgaccaaactggtgcccttgtagtgaatgcaggcgcgagaaatggtcttggagctcctgttcgacttgtagctcctgccccagtcatcattagttcctcagctgcacaagcaggaacacagcagcctcagccccagccccagcagcagcccaataacaacctggcatccagttctttctacggcaacaactctctgaacagcaattcacagagcagctccctcttctcccagggctctgcccagcctgccaacacatccttgggattcggaagtagcagttctctcggcgccaccctgggatccgcccttggagggtttggaacagcagttgcaaactccaacactggcagtggctcccgccgtgactccctgactggcagcagtgacctttataagaggacatcgagcagcttgacccccattggacacagtttttataacggccttagcttttcctcctctcctggacccgtgggcatgcctctccctagtcagggaccaggacattcacagacaccacctccttccctctcttcacatggatcctcttcaagcttaaacctgggaggactcacgaatggcagtggaagatacatctctgctgctccaggcgctgaagccaagtaccgcagtgcaagcagcgcctccagcctcttcagcccgagcagcactcttttctcttcctctcgtttgcgatatggaatgtctgatgtcatgccttctggcaggagcaggcttttggaagattttcgaaacaaccggtaccccaatttacaactgcgggagattgctggacatataatggaattttcccaagaccagcatgggtccagattcattcagctgaaactggagcgtgccacaccagctgagcgccagcttgtcttcaatgaaatcctccaggctgcctaccaactcatggtggatgtgtttggtaattacgtcattcagaagttctttgaatttggcagtcttgaacagaagctggctttggcagaacggattcgaggccacgtcctgtcattggcactacagatgtatggctgccgtgttatccagaaagctcttgagtttattccttcagaccagcagaatgagatggttcgggaactagatggccatgtcttgaagtgtgtgaaagatcagaatggcaatcacgtggttcagaaatgcattgaatgtgtacagccccagtctttgcaatttatcatcgatgcgtttaagggacaggtatttgccttatccacacatccttatggctgccgagtgattcagagaatcctggagcactgtctccctgaccagacactccctattttagaggagcttcaccagcacacagagcagcttgtacaggatcaatatggaaattatgtaatccaacatgtactggagcacggtcgtcctgaggataaaagcaaaattgtagcagaaatccgaggcaatgtacttgtattgagtcagcacaaatttgcaagcaatgttgtggagaagtgtgttactcacgcctcacgtacggagcgcgctgtgctcatcgatgaggtgtgcaccatgaacgacggtccccacagtgccttatacaccatgatgaaggaccagtatgccaactacgtggtccagaagatgattgacgtggcggagccaggccagcggaagatcgtcatgcataagatccggccccacatcgcaactcttcgtaagtacacctatggcaagcacattctggccaagctggagaagtactacatgaagaacggtgttgacttagggcccatctgtggcccccctaatggtatcatctgaggcagtgtcacccgctgttccctcattcccgctgacctcactggcccactggcaaatccaaccagcaaccagaaatgttctagtgtagagtctgagacgggcaagtggttgctccaggattactccctcctccaaaaaaggaatcaaatccacgagtggaaaagcctttgtaaatttaattttattacacataacatgtactattttttttaattgactaattgccctgctgttttactggtgtataggatacttgtacataggtaaccaatgtacatgggaggccacatattttgttcactgttgtatctatatttcacatgtggaaactttcagggtggttggtttaacaaaaaaaaaaagctttaaaaaaaaaagaaaaaaaggaaaaggtttttagctcatttgcctggccggcaagttttgcaaatagctcttccccacctcctcattttagtaaaaaacaaacaaaaacaaaaaaacctgagaagtttgaattgtagttaaatgaccccaaactggcatttaacactgtttataaaaaatatatatatatatatatatatataatgaaaaaggtttcagagttgctaaagcttcagtttgtgacattaagtttatgaaattctaaaaaatgccttttttggagactatattatgctgaagaaggctgttcgtgaggaggagatgcgagcacccagaacgtcttttgaggctgggcgggtgtgattgtttactgcctactggatttttttctattaacattgaaaggtaaaatctgattatttagcatgagaaaaaaaaatccaactctgcttttggtcttgcttctataaatatatagtgtatacttggtgtagactttgcatatatacaaatttgtagtattttcttgttttgatgtctaatctgtatctataatgtaccctagtagtcgaacatacttttgattgtacaattgtacatttgtatacctgtaatgtaaatgtggagaagtttgaatcaacataaacacgttttttggtaagaaaagagaattagccagccctgtgcattcagtgtatattctcaccttttatggtcgtagcatatagtgttgtatattgtaaattgtaatttcaaccagaagtaaatttttttcttttgaaggaataaatgttctttatacagcctagttaatgtttaaaaagaaaaaaatagcttggttttatttgtcatctagtctcaagtatagcgagattctttctaaatgttattcaagattgagttctcactagtgtttttttaatcctaaaaaagtaatgttttgattttgtgacagtcaaaaggacgtgcaaaagtctagccttgcccgagctttccttacaatcagagcccctctcaccttgtaaaaaacctgtgtatgcttatgcctgggcaactattttttgtaactcttgtgtagattgtctctaaacaatgtgtgatctttattttgaaaaatacagaactttggaatctg

SEQ ID NO: 76 - DNA, 5361 bp, Homo sapiens
atgttgtcggagtgaaaggtaagggggagcgagagcgccagagagagaagatcggggggctgaaatccatcttcatcctaccgctccgcccgtgttggtggaatgagcgttgcatgtgtcttgaagagaaaagcagtgctttggcaggactctttcagcccccacctgaaacatcaccctcaagaaccagctaatcccaacatgcctgttgttttgacatctggaacagggtcgcaagcgcagccacaaccagctgcaaatcaggctcttgcagctgggactcactccagccctgtcccaggatctataggagttgcaggccgttcccaggacgacgctatggtggactacttctttcagaggcagcatggtgagcagcttgggggaggaggaagtggaggaggcggctataataatagcaaacatcgatggcctactggggataacattcatgcagaacatcaggtgcgttccatggatgaactgaatcatgattttcaagcacttgctctggagggaagagcgatgggagagcagctcttgccaggtaaaaagttttgggaaacagatgaatccagcaaagatggaccaaaaggaatattcctgggtgatcaatggcgagacagtgcctggggaacatcagatcattcagtttcccagccaatcatggtgcagagaagacctggtcagagtttccatgtgaacagtgaggtcaattctgtactgtccccacgatcggagagtgggggactaggcgttagcatggtggagtatgtgttgagctcatccccgggcgattcctgtctaagaaaaggaggatttggcccaagggatgcagacagtgatgaaaacgacaaaggtgaaaagaagaacaagggtacgtttgatggagataagctaggagatttgaaggaggagggtgatgtgatggacaagaccaatggtttaccagtgcagaatgggattgatgcagacgtcaaagattttagccgtacccctggtaattgccagaactctgctaatgaagtggatcttctgggtccaaaccagaatggttctgagggcttagcccagctgaccagcaccaatggtgccaagcctgtggaggatttctccaacatggagtcccagagtgtccccttggaccccatggaacatgtgggcatggagcctcttcagtttgattattcaggcacgcaggtacctgtggactcagcagcagcaactgtgggactttttgactacaattctcaacaacagctgttccaaagacctaatgcgcttgctgtccagcagttgacagctgctcagcagcagcagtatgcactggcagctgctcatcagccgcacatcggcccagctgtggtccctcaccagtattatggagttactccctggggagtctaccctgccagtcttttccagcagcaagctgccgctgccgctgcagcaactaattcagctaatcaacagaccaccccacaggctcagcaaggacagcagcaggttctccgtggaggagccagccaacgtcctttgaccccaaaccagaaccagcagggacagcaaacggatccccttgtggcagctgcagcagtgaattctgcccttgcatttggacaaggtctggcagcaggcatgccaggttatccggtgttggctcctgctgcttactatgaccaaactggtgcccttgtagtgaatgcaggcgcgagaaatggtcttggagctcctgttcgacttgtagctcctgccccagtcatcattagttcctcagctgcacaagcagctgttgcagcagccgcagcttcagcaaatggagcagctggtggtcttgctggaacaacaaatggaccatttcgccctttaggaacacagcagcctcagccccagccccagcagcagcccaataacaacctggcatccagttctttctacggcaacaactctctgaacagcaattcacagagcagctccctcttctcccagggctctgcccagcctgccaacacatccttgggattcggaagtagcagttctctcggcgccaccctgggatccgcccttggagggtttggaacagcagttgcaaactccaacactggcagtggctcccgccgtgactccctgactggcagcagtgacctttataagaggacatcgagcagcttgacccccattggacacagtttttataacggccttagcttttcctcctctcctggacccgtgggcatgcctctccctagtcagggaccaggacattcacagacaccacctccttccctctcttcacatggatcctcttcaagcttaaacctgggaggactcacgaatggcagtggaagatacatctctgctgctccaggcgctgaagccaagtaccgcagtgcaagcagcgcctccagcctcttcagcccgagcagcactcttttctcttcctctcgtttgcgatatggaatgtctgatgtcatgccttctggcaggagcaggcttttggaagattttcgaaacaaccggtaccccaatttacaactgcgggagattgctggacatataatggaattttcccaagaccagcatgggtccagattcattcagctgaaactggagcgtgccacaccagctgagcgccagcttgtcttcaatgaaatcctccaggctgcctaccaactcatggtggatgtgtttggtaattacgtcattcagaagttctttgaatttggcagtcttgaacagaagctggctttggcagaacggattcgaggccacgtcctgtcattggcactacagatgtatggctgccgtgttatccagaaagctcttgagtttattccttcagaccagcagaatgagatggttcgggaactagatggccatgtcttgaagtgtgtgaaagatcagaatggcaatcacgtggttcagaaatgcattgaatgtgtacagccccagtctttgcaatttatcatcgatgcgtttaagggacaggtatttgccttatccacacatccttatggctgccgagtgattcagagaatcctggagcactgtctccctgaccagacactccctattttagaggagcttcaccagcacacagagcagcttgtacaggatcaatatggaaattatgtaatccaacatgtactggagcacggtcgtcctgaggataaaagcaaaattgtagcagaaatccgaggcaatgtacttgtattgagtcagcacaaatttgcaagcaatgttgtggagaagtgtgttactcacgcctcacgtacggagcgcgctgtgctcatcgatgaggtgtgcaccatgaacgacggtccccacagtgccttatacaccatgatgaaggaccagtatgccaactacgtggtccagaagatgattgacgtggcggagccaggccagcggaagatcgtcatgcataagatccggccccacatcgcaactcttcgtaagtacacctatggcaagcacattctggccaagctggagaagtactacatgaagaacggtgttgacttagggcccatctgtggcccccctaatggtatcatctgaggcagtgtcacccgctgttccctcattcccgctgacctcactggcccactggcaaatccaaccagcaaccagaaatgttctagtgtagagtctgagacgggcaagtggttgctccaggattactccctcctccaaaaaaggaatcaaatccacgagtggaaaagcctttgtaaatttaattttattacacataacatgtactattttttttaattgactaattgccctgctgttttactggtgtataggatacttgtacataggtaaccaatgtacatgggaggccacatattttgttcactgttgtatctatatttcacatgtggaaactttcagggtggttggtttaacaaaaaaaaaaagctttaaaaaaaaaagaaaaaaaggaaaaggtttttagctcatttgcctggccggcaagttttgcaaatagctcttccccacctcctcattttagtaaaaaacaaacaaaaacaaaaaaacctgagaagtttgaattgtagttaaatgaccccaaactggcatttaacactgtttataaaaaatatatatatatatatatatatataatgaaaaaggtttcagagttgctaaagcttcagtttgtgacattaagtttatgaaattctaaaaaatgccttttttggagactatattatgctgaagaaggctgttcgtgaggaggagatgcgagcacccagaacgtcttttgaggctgggcgggtgtgattgtttactgcctactggatttttttctattaacattgaaaggtaaaatctgattatttagcatgagaaaaaaaaatccaactctgcttttggtcttgcttctataaatatatagtgtatacttggtgtagactttgcatatatacaaatttgtagtattttcttgttttgatgtctaatctgtatctataatgtaccctagtagtcgaacatacttttgattgtacaattgtacatttgtatacctgtaatgtaaatgtggagaagtttgaatcaacataaacacgttttttggtaagaaaagagaattagccagccctgtgcattcagtgtatattctcaccttttatggtcgtagcatatagtgttgtatattgtaaattgtaatttcaaccagaagtaaatttttttcttttgaaggaataaatgttctttatacagcctagttaatgtttaaaaagaaaaaaatagcttggttttatttgtcatctagtctcaagtatagcgagattctttctaaatgttattcaagattgagttctcactagtgtttttttaatcctaaaaaagtaatgttttgattttgtgacagtcaaaaggacgtgcaaaagtctagccttgcccgagctttccttacaatcagagcccctctcaccttgtaaagtgtgaatcgcccttcccttttgtacagaagatgaactgtattttgcattttgtctacttgtaagtgaatgtaacatactgtcaattttccttgtttgaatatagaattgtaacactacacggtgtacatttccagagccttgtgtatatttccaatgaacttttttgcaagcacacttgtaaccatatgtgtataattaacaaacctgtgtatgcttatgcctgggcaactattttttgtaactcttgtgtagattgtctctaaacaatgtgtgatctttattttgaaaaatacagaactttggaatctgaaaaaaaaaaaaaaaaaaaaaaaamaamaaaaasaaaaaacaaaacaaaaacarrmaamaraaamaaacacaaaaraaarammaaaacacaacaaca

SEQ ID NO: 77 - DNA, 5264 bp, Homo sapiens
atgttgtcggagtgaaaggtaagggggagcgagagcgccagagagagaagatcggggggctgaaatccatcttcatcctaccgctccgcccgtgttggtggaatgagcgttgcatgtgtcttgaagagaaaagcagtgctttggcaggactctttcagcccccacctgaaacatcaccctcaagaaccagctaatcccaacatgcctgttgttttgacatctggaacagggtcgcaagcgcagccacaaccagctgcaaatcaggctcttgcagctgggactcactccagccctgtcccaggatctataggagttgcaggccgttcccaggacgacgctatggtggactacttctttcagaggcagcatggtgagcagcttgggggaggaggaagtggaggaggcggctataataatagcaaacatcgatggcctactggggataacattcatgcagaacatcaggtgcgttccatggatgaactgaatcatgattttcaagcacttgctctggagggaagagcgatgggagagcagctcttgccaggtaaaaagttttgggaaacagatgaatccagcaaagatggaccaaaaggaatattcctgggtgatcaatggcgagacagtgcctggggaacatcagatcattcagtttcccagccaatcatggtgcagagaagacctggtcagagtttccatgtgaacagtgaggtcaattctgtactgtccccacgatcggagagtgggggactaggcgttagcatggtggagtatgtgttgagctcatccccgggcgattcctgtctaagaaaaggaggatttggcccaagggatgcagacagtgatgaaaacgacaaaggtgaaaagaagaacaagggtacgtttgatggagataagctaggagatttgaaggaggagggtgatgtgatggacaagaccaatggtttaccagtgcagaatgggattgatgcagacgtcaaagattttagccgtacccctggtaattgccagaactctgctaatgaagtggatcttctgggtccaaaccagaatggttctgagggcttagcccagctgaccagcaccaatggtgccaagcctgtggaggatttctccaacatggagtcccagagtgtccccttggaccccatggaacatgtgggcatggagcctcttcagtttgattattcaggcacgcaggtacctgtggactcagcagcagcaactgtgggactttttgactacaattctcaacaacagctgttccaaagacctaatgcgcttgctgtccagcagttgacagctgctcagcagcagcagtatgcactggcagctgctcatcagccgcacatcggcccagctgtggtccctcaccagtattatggagttactccctggggagtctaccctgccagtcttttccagcagcaagctgccgctgccgctgcagcaactaattcagctaatcaacagaccaccccacaggctcagcaaggacagcagcaggttctccgtggaggagccagccaacgtcctttgaccccaaaccagaaccagcagggacagcaaacggatccccttgtggcagctgcagcagtgaattctgcccttgcatttggacaaggtctggcagcaggcatgccaggttatccggtgttggctcctgctgcttactatgaccaaactggtgcccttgtagtgaatgcaggcgcgagaaatggtcttggagctcctgttcgacttgtagctcctgccccagtcatcattagttcctcagctgcacaagcagctgttgcagcagccgcagcttcagcaaatggagcagctggtggtcttgctggaacaacaaatggaccatttcgccctttaggaacacagcagcctcagccccagccccagcagcagcccaataacaacctggcatccagttctttctacggcaacaactctctgaacagcaattcacagagcagctccctcttctcccagggctctgcccagcctgccaacacatccttgggattcggaagtagcagttctctcggcgccaccctgggatccgcccttggagggtttggaacagcagttgcaaactccaacactggcagtggctcccgccgtgactccctgactggcagcagtgacctttataagaggacatcgagcagcttgacccccattggacacagtttttataacggccttagcttttcctcctctcctggacccgtgggcatgcctctccctagtcagggaccaggacattcacagacaccacctccttccctctcttcacatggatcctcttcaagcttaaacctgggaggactcacgaatggcagtggaagatacatctctgctgctccaggcgctgaagccaagtaccgcagtgcaagcagcgcctccagcctcttcagcccgagcagcactcttttctcttcctctcgtttgcgatatggaatgtctgatgtcatgccttctggcaggagcaggcttttggaagattttcgaaacaaccggtaccccaatttacaactgcgggagattgctggacatataatggaattttcccaagaccagcatgggtccagattcattcagctgaaactggagcgtgccacaccagctgagcgccagcttgtcttcaatgaaatcctccaggctgcctaccaactcatggtggatgtgtttggtaattacgtcattcagaagttctttgaatttggcagtcttgaacagaagctggctttggcagaacggattcgaggccacgtcctgtcattggcactacagatgtatggctgccgtgttatccagaaagctcttgagtttattccttcagaccagcagaatgagatggttcgggaactagatggccatgtcttgaagtgtgtgaaagatcagaatggcaatcacgtggttcagaaatgcattgaatgtgtacagccccagtctttgcaatttatcatcgatgcgtttaagggacaggtatttgccttatccacacatccttatggctgccgagtgattcagagaatcctggagcactgtctccctgaccagacactccctattttagaggagcttcaccagcacacagagcagcttgtacaggatcaatatggaaattatgtaatccaacatgtactggagcacggtcgtcctgaggataaaagcaaaattgtagcagaaatccgaggcaatgtacttgtattgagtcagcacaaatttgcaagcaatgttgtggagaagtgtgttactcacgcctcacgtacggagcgcgctgtgctcatcgatgaggtgtgcaccatgaacgacggtccccacagtgccttatacaccatgatgaaggaccagtatgccaactacgtggtccagaagatgattgacgtggcggagccaggccagcggaagatcgtcatgcataagatccggccccacatcgcaactcttcgtaagtacacctatggcaagcacattctggccaagctggagaagtactacatgaagaacggtgttgacttagggcccatctgtggcccccctaatggtatcatctgaggcagtgtcacccgctgttccctcattcccgctgacctcactggcccactggcaaatccaaccagcaaccagaaatgttctagtgtagagtctgagacgggcaagtggttgctccaggattactccctcctccaaaaaaggaatcaaatccacgagtggaaaagcctttgtaaatttaattttattacacataacatgtactattttttttaattgactaattgccctgctgttttactggtgtataggatacttgtacataggtaaccaatgtacatgggaggccacatattttgttcactgttgtatctatatttcacatgtggaaactttcagggtggttggtttaacaaaaaaaaaaagctttaaaaaaaaaagaaaaaaaggaaaaggtttttagctcatttgcctggccggcaagttttgcaaatagctcttccccacctcctcattttagtaaaaaacaaacaaaaacaaaaaaacctgagaagtttgaattgtagttaaatgaccccaaactggcatttaacactgtttataaaaaatatatatatatatatatatatataatgaaaaaggtttcagagttgctaaagcttcagtttgtgacattaagtttatgaaattctaaaaaatgccttttttggagactatattatgctgaagaaggctgttcgtgaggaggagatgcgagcacccagaacgtcttttgaggctgggcgggtgtgattgtttactgcctactggatttttttctattaacattgaaaggtaaaatctgattatttagcatgagaaaaaaaaatccaactctgcttttggtcttgcttctataaatatatagtgtatacttggtgtagactttgcatatatacaaatttgtagtattttcttgttttgatgtctaatctgtatctataatgtaccctagtagtcgaacatacttttgattgtacaattgtacatttgtatacctgtaatgtaaatgtggagaagtttgaatcaacataaacacgttttttggtaagaaaagagaattagccagccctgtgcattcagtgtatattctcaccttttatggtcgtagcatatagtgttgtatattgtaaattgtaatttcaaccagaagtaaatttttttcttttgaaggaataaatgttctttatacagcctagttaatgtttaaaaagaaaaaaatagcttggttttatttgtcatctagtctcaagtatagcgagattctttctaaatgttattcaagattgagttctcactagtgtttttttaatcctaaaaaagtaatgttttgattttgtgacagtcaaaaggacgtgcaaaagtctagccttgcccgagctttccttacaatcagagcccctctcaccttgtaaagtgtgaatcgcccttcccttttgtacagaagatgaactgtattttgcattttgtctacttgtaagtgaatgtaacatactgtcaattttccttgtttgaatatagaattgtaacactacacggtgtacatttccagagccttgtgtatatttccaatgaacttttttgcaagcacacttgtaaccatatgtgtataattaacaaacctgtgtatgcttatgcctgggcaactattttttgtaactcttgtgtagattgtctctaaacaatgtgtgatctttattttgaaaaatacagaactttggaatctg

SEQ ID NO: 78 - DNA, 5062 bp, Homo sapiens
atgttgtcggagtgaaaggtaagggggagcgagagcgccagagagagaagatcggggggctgaaatccatcttcatcctaccgctccgcccgtgttggtggaatgagcgttgcatgtgtcttgaagagaaaagcagtgctttggcaggactctttcagcccccacctgaaacatcaccctcaagaaccagctaatcccaacatgcctgttgttttgacatctggaacagggtcgcaagcgcagccacaaccagctgcaaatcaggctcttgcagctgggactcactccagccctgtcccaggatctataggagttgcaggccgttcccaggacgacgctatggtggactacttctttcagaggcagcatggtgagcagcttgggggaggaggaagtggaggaggcggctataataatagcaaacatcgatggcctactggggataacattcatgcagaacatcaggtgcgttccatggatgaactgaatcatgattttcaagcacttgctctggagggaagagcgatgggagagcagctcttgccaggtaaaaagttttgggaaacagatgaatccagcaaagatggaccaaaaggaatattcctgggtgatcaatggcgagacagtgcctggggaacatcagatcattcagtttcccagccaatcatggtgcagagaagacctggtcagagtttccatgtgaacagtgaggtcaattctgtactgtccccacgatcggagagtgggggactaggcgttagcatggtggagtatgtgttgagctcatccccgggcgattcctgtctaagaaaaggaggatttggcccaagggatgcagacagtgatgaaaacgacaaaggtgaaaagaagaacaagggtacgtttgatggagataagctaggagatttgaaggaggagggtgatgtgatggacaagaccaatggtttaccagtgcagaatgggattgatgcagacgtcaaagattttagccgtacccctggtaattgccagaactctgctaatgaagtggatcttctgggtccaaaccagaatggttctgagggcttagcccagctgaccagcaccaatggtgccaagcctgtggaggatttctccaacatggagtcccagagtgtccccttggaccccatggaacatgtgggcatggagcctcttcagtttgattattcaggcacgcaggtacctgtggactcagcagcagcaactgtgggactttttgactacaattctcaacaacagctgttccaaagacctaatgcgcttgctgtccagcagttgacagctgctcagcagcagcagtatgcactggcagctgctcatcagccgcacatcggcccagctgtggtccctcaccagtattatggagttactccctggggagtctaccctgccagtcttttccagcagcaagctgccgctgccgctgcagcaactaattcagctaatcaacagaccaccccacaggctcagcaaggacagcagcaggttctccgtggaggagccagccaacgtcctttgaccccaaaccagaaccagcagggacagcaaacggatccccttgtggcagctgcagcagtgaattctgcccttgcatttggacaaggtctggcagcaggcatgccaggttatccggtgttggctcctgctgcttactatgaccaaactggtgcccttgtagtgaatgcaggcgcgagaaatggtcttggagctcctgttcgacttgtagctcctgccccagtcatcattagttcctcagctgcacaagcagctgttgcagcagccgcagcttcagcaaatggagcagctggtggtcttgctggaacaacaaatggaccatttcgccctttaggaacacagcagcctcagccccagccccagcagcagcccaataacaacctggcatccagttctttctacggcaacaactctctgaacagcaattcacagagcagctccctcttctcccagggctctgcccagcctgccaacacatccttgggattcggaagtagcagttctctcggcgccaccctgggatccgcccttggagggtttggaacagcagttgcaaactccaacactggcagtggctcccgccgtgactccctgactggcagcagtgacctttataagaggacatcgagcagcttgacccccattggacacagtttttataacggccttagcttttcctcctctcctggacccgtgggcatgcctctccctagtcagggaccaggacattcacagacaccacctccttccctctcttcacatggatcctcttcaagcttaaacctgggaggactcacgaatggcagtggaagatacatctctgctgctccaggcgctgaagccaagtaccgcagtgcaagcagcgcctccagcctcttcagcccgagcagcactcttttctcttcctctcgtttgcgatatggaatgtctgatgtcatgccttctggcaggagcaggcttttggaagattttcgaaacaaccggtaccccaatttacaactgcgggagattgctggacatataatggaattttcccaagaccagcatgggtccagattcattcagctgaaactggagcgtgccacaccagctgagcgccagcttgtcttcaatgaaatcctccaggctgcctaccaactcatggtggatgtgtttggtaattacgtcattcagaagttctttgaatttggcagtcttgaacagaagctggctttggcagaacggattcgaggccacgtcctgtcattggcactacagatgtatggctgccgtgttatccagaaagctcttgagtttattccttcagaccagcagaatgagatggttcgggaactagatggccatgtcttgaagtgtgtgaaagatcagaatggcaatcacgtggttcagaaatgcattgaatgtgtacagccccagtctttgcaatttatcatcgatgcgtttaagggacaggtatttgccttatccacacatccttatggctgccgagtgattcagagaatcctggagcactgtctccctgaccagacactccctattttagaggagcttcaccagcacacagagcagcttgtacaggatcaatatggaaattatgtaatccaacatgtactggagcacggtcgtcctgaggataaaagcaaaattgtagcagaaatccgaggcaatgtacttgtattgagtcagcacaaatttgcaagcaatgttgtggagaagtgtgttactcacgcctcacgtacggagcgcgctgtgctcatcgatgaggtgtgcaccatgaacgacggtccccacagtgccttatacaccatgatgaaggaccagtatgccaactacgtggtccagaagatgattgacgtggcggagccaggccagcggaagatcgtcatgcataagatccggccccacatcgcaactcttcgtaagtacacctatggcaagcacattctggccaagctggagaagtactacatgaagaacggtgttgacttagggcccatctgtggcccccctaatggtatcatctgaggcagtgtcacccgctgttccctcattcccgctgacctcactggcccactggcaaatccaaccagcaaccagaaatgttctagtgtagagtctgagacgggcaagtggttgctccaggattactccctcctccaaaaaaggaatcaaatccacgagtggaaaagcctttgtaaatttaattttattacacataacatgtactattttttttaattgactaattgccctgctgttttactggtgtataggatacttgtacataggtaaccaatgtacatgggaggccacatattttgttcactgttgtatctatatttcacatgtggaaactttcagggtggttggtttaacaaaaaaaaaaagctttaaaaaaaaaagaaaaaaaggaaaaggtttttagctcatttgcctggccggcaagttttgcaaatagctcttccccacctcctcattttagtaaaaaacaaacaaaaacaaaaaaacctgagaagtttgaattgtagttaaatgaccccaaactggcatttaacactgtttataaaaaatatatatatatatatatatatataatgaaaaaggtttcagagttgctaaagcttcagtttgtgacattaagtttatgaaattctaaaaaatgccttttttggagactatattatgctgaagaaggctgttcgtgaggaggagatgcgagcacccagaacgtcttttgaggctgggcgggtgtgattgtttactgcctactggatttttttctattaacattgaaaggtaaaatctgattatttagcatgagaaaaaaaaatccaactctgcttttggtcttgcttctataaatatatagtgtatacttggtgtagactttgcatatatacaaatttgtagtattttcttgttttgatgtctaatctgtatctataatgtaccctagtagtcgaacatacttttgattgtacaattgtacatttgtatacctgtaatgtaaatgtggagaagtttgaatcaacataaacacgttttttggtaagaaaagagaattagccagccctgtgcattcagtgtatattctcaccttttatggtcgtagcatatagtgttgtatattgtaaattgtaatttcaaccagaagtaaatttttttcttttgaaggaataaatgttctttatacagcctagttaatgtttaaaaagaaaaaaatagcttggttttatttgtcatctagtctcaagtatagcgagattctttctaaatgttattcaagattgagttctcactagtgtttttttaatcctaaaaaagtaatgttttgattttgtgacagtcaaaaggacgtgcaaaagtctagccttgcccgagctttccttacaatcagagcccctctcaccttgtaaaaaacctgtgtatgcttatgcctgggcaactattttttgtaactcttgtgtagattgtctctaaacaatgtgtgatctttattttgaaaaatacagaactttggaatctg

SEQ ID NO: 79 - DNA, 5280 bp, Homo sapiens
atgttgtcggagtgaaaggtaagggggagcgagagcgccagagagagaagatcggggggctgaaatccatcttcatcctaccgctccgcccgtgttggtggaatgagcgttgcatgtgtcttgaagagaaaagcagtgctttggcaggactctttcagcccccacctgaaacatcaccctcaagaaccagctaatcccaacatgcctgttgttttgacatctggaacagggtcgcaagcgcagccacaaccagctgcaaatcaggctcttgcagctgggactcactccagccctgtcccaggatctataggagttgcaggccgttcccaggacgacgctatggtggactacttctttcagaggcagcatggtgagcagcttgggggaggaggaagtggaggaggcggctataataatagcaaacatcgatggcctactggggataacattcatgcagaacatcaggtgcgttccatggatgaactgaatcatgattttcaagcacttgctctggagggaagagcgatgggagagcagctcttgccaggtaaaaagttttgggaaacagatgaatccagcaaagatggaccaaaaggaatattcctgggtgatcaatggcgagacagtgcctggggaacatcagatcattcagtttcccagccaatcatggtgcagagaagacctggtcagagtttccatgtgaacagtgaggtcaattctgtactgtccccacgatcggagagtgggggactaggcgttagcatggtggagtatgtgttgagctcatccccgggcgattcctgtctaagaaaaggaggatttggcccaagggatgcagacagtgatgaaaacgacaaaggtgaaaagaagaacaagggtacgtttgatggagataagctaggagatttgaaggaggagggtgatgtgatggacaagaccaatggtttaccagtgcagaatgggattgatgcagacgtcaaagattttagccgtacccctggtaattgccagaactctgctaatgaagtggatcttctgggtccaaaccagaatggttctgagggcttagcccagctgaccagcaccaatggtgccaagcctgtggaggatttctccaacatggagtcccagagtgtccccttggaccccatggaacatgtgggcatggagcctcttcagtttgattattcaggcacgcaggtacctgtggactcagcagcagcaactgtgggactttttgactacaattctcaacaacagctgttccaaagacctaatgcgcttgctgtccagcagttgacagctgctcagcagcagcagtatgcactggcagctgctcatcagccgcacatcggcccagctgtggtccctcaccagtattatggagttactccctggggagtctaccctgccagtcttttccagcagcaagctgccgctgccgctgcagcaactaattcagctaatcaacagaccaccccacaggctcagcaaggacagcagcaggttctccgtggaggagccagccaacgtcctttgaccccaaaccagaaccagcagggacagcaaacggatccccttgtggcagctgcagcagtgaattctgcccttgcatttggacaaggtctggcagcaggcatgccaggttatccggtgttggctcctgctgcttactatgaccaaactggtgcccttgtagtgaatgcaggcgcgagaaatggtcttggagctcctgttcgacttgtagctcctgccccagtcatcattagttcctcagctgcacaagcaggaacacagcagcctcagccccagccccagcagcagcccaataacaacctggcatccagttctttctacggcaacaactctctgaacagcaattcacagagcagctccctcttctcccagggctctgcccagcctgccaacacatccttgggattcggaagtagcagttctctcggcgccaccctgggatccgcccttggagggtttggaacagcagttgcaaactccaacactggcagtggctcccgccgtgactccctgactggcagcagtgacctttataagaggacatcgagcagcttgacccccattggacacagtttttataacggccttagcttttcctcctctcctggacccgtgggcatgcctctccctagtcagggaccaggacattcacagacaccacctccttccctctcttcacatggatcctcttcaagcttaaacctgggaggactcacgaatggcagtggaagatacatctctgctgctccaggcgctgaagccaagtaccgcagtgcaagcagcgcctccagcctcttcagcccgagcagcactcttttctcttcctctcgtttgcgatatggaatgtctgatgtcatgccttctggcaggagcaggcttttggaagattttcgaaacaaccggtaccccaatttacaactgcgggagattgctggacatataatggaattttcccaagaccagcatgggtccagattcattcagctgaaactggagcgtgccacaccagctgagcgccagcttgtcttcaatgaaatcctccaggctgcctaccaactcatggtggatgtgtttggtaattacgtcattcagaagttctttgaatttggcagtcttgaacagaagctggctttggcagaacggattcgaggccacgtcctgtcattggcactacagatgtatggctgccgtgttatccagaaagctcttgagtttattccttcagaccagcagaatgagatggttcgggaactagatggccatgtcttgaagtgtgtgaaagatcagaatggcaatcacgtggttcagaaatgcattgaatgtgtacagccccagtctttgcaatttatcatcgatgcgtttaagggacaggtatttgccttatccacacatccttatggctgccgagtgattcagagaatcctggagcactgtctccctgaccagacactccctattttagaggagcttcaccagcacacagagcagcttgtacaggatcaatatggaaattatgtaatccaacatgtactggagcacggtcgtcctgaggataaaagcaaaattgtagcagaaatccgaggcaatgtacttgtattgagtcagcacaaatttgcaagcaatgttgtggagaagtgtgttactcacgcctcacgtacggagcgcgctgtgctcatcgatgaggtgtgcaccatgaacgacggtccccacagtgccttatacaccatgatgaaggaccagtatgccaactacgtggtccagaagatgattgacgtggcggagccaggccagcggaagatcgtcatgcataagatccggccccacatcgcaactcttcgtaagtacacctatggcaagcacattctggccaagctggagaagtactacatgaagaacggtgttgacttagggcccatctgtggcccccctaatggtatcatctgaggcagtgtcacccgctgttccctcattcccgctgacctcactggcccactggcaaatccaaccagcaaccagaaatgttctagtgtagagtctgagacgggcaagtggttgctccaggattactccctcctccaaaaaaggaatcaaatccacgagtggaaaagcctttgtaaatttaattttattacacataacatgtactattttttttaattgactaattgccctgctgttttactggtgtataggatacttgtacataggtaaccaatgtacatgggaggccacatattttgttcactgttgtatctatatttcacatgtggaaactttcagggtggttggtttaacaaaaaaaaaaagctttaaaaaaaaaagaaaaaaaggaaaaggtttttagctcatttgcctggccggcaagttttgcaaatagctcttccccacctcctcattttagtaaaaaacaaacaaaaacaaaaaaacctgagaagtttgaattgtagttaaatgaccccaaactggcatttaacactgtttataaaaaatatatatatatatatatatatataatgaaaaaggtttcagagttgctaaagcttcagtttgtgacattaagtttatgaaattctaaaaaatgccttttttggagactatattatgctgaagaaggctgttcgtgaggaggagatgcgagcacccagaacgtcttttgaggctgggcgggtgtgattgtttactgcctactggatttttttctattaacattgaaaggtaaaatctgattatttagcatgagaaaaaaaaatccaactctgcttttggtcttgcttctataaatatatagtgtatacttggtgtagactttgcatatatacaaatttgtagtattttcttgttttgatgtctaatctgtatctataatgtaccctagtagtcgaacatacttttgattgtacaattgtacatttgtatacctgtaatgtaaatgtggagaagtttgaatcaacataaacacgttttttggtaagaaaagagaattagccagccctgtgcattcagtgtatattctcaccttttatggtcgtagcatatagtgttgtatattgtaaattgtaatttcaaccagaagtaaatttttttcttttgaaggaataaatgttctttatacagcctagttaatgtttaaaaagaaaaaaatagcttggttttatttgtcatctagtctcaagtatagcgagattctttctaaatgttattcaagattgagttctcactagtgtttttttaatcctaaaaaagtaatgttttgattttgtgacagtcaaaaggacgtgcaaaagtctagccttgcccgagctttccttacaatcagagcccctctcaccttgtaaagtgtgaatcgcccttcccttttgtacagaagatgaactgtattttgcattttgtctacttgtaagtgaatgtaacatactgtcaattttccttgtttgaatatagaattgtaacactacacggtgtacatttccagagccttgtgtatatttccaatgaacttttttgcaagcacacttgtaaccatatgtgtataattaacaaacctgtgtatgcttatgcctgggcaactattttttgtaactcttgtgtagattgtctctaaacaatgtgtgatctttattttgaaaaatacagaactttggaatctgaaaaaaaaaaaaaaaaaaaaaaaamaamaaaaasaaaaaacaaaacaaaaacarrmaamaraaamaaacacaaaaraaarammaaaacacaacaaca

SEQ ID NO: 80 - DNA, 5183 bp, Homo sapiens
atgttgtcggagtgaaaggtaagggggagcgagagcgccagagagagaagatcggggggctgaaatccatcttcatcctaccgctccgcccgtgttggtggaatgagcgttgcatgtgtcttgaagagaaaagcagtgctttggcaggactctttcagcccccacctgaaacatcaccctcaagaaccagctaatcccaacatgcctgttgttttgacatctggaacagggtcgcaagcgcagccacaaccagctgcaaatcaggctcttgcagctgggactcactccagccctgtcccaggatctataggagttgcaggccgttcccaggacgacgctatggtggactacttctttcagaggcagcatggtgagcagcttgggggaggaggaagtggaggaggcggctataataatagcaaacatcgatggcctactggggataacattcatgcagaacatcaggtgcgttccatggatgaactgaatcatgattttcaagcacttgctctggagggaagagcgatgggagagcagctcttgccaggtaaaaagttttgggaaacagatgaatccagcaaagatggaccaaaaggaatattcctgggtgatcaatggcgagacagtgcctggggaacatcagatcattcagtttcccagccaatcatggtgcagagaagacctggtcagagtttccatgtgaacagtgaggtcaattctgtactgtccccacgatcggagagtgggggactaggcgttagcatggtggagtatgtgttgagctcatccccgggcgattcctgtctaagaaaaggaggatttggcccaagggatgcagacagtgatgaaaacgacaaaggtgaaaagaagaacaagggtacgtttgatggagataagctaggagatttgaaggaggagggtgatgtgatggacaagaccaatggtttaccagtgcagaatgggattgatgcagacgtcaaagattttagccgtacccctggtaattgccagaactctgctaatgaagtggatcttctgggtccaaaccagaatggttctgagggcttagcccagctgaccagcaccaatggtgccaagcctgtggaggatttctccaacatggagtcccagagtgtccccttggaccccatggaacatgtgggcatggagcctcttcagtttgattattcaggcacgcaggtacctgtggactcagcagcagcaactgtgggactttttgactacaattctcaacaacagctgttccaaagacctaatgcgcttgctgtccagcagttgacagctgctcagcagcagcagtatgcactggcagctgctcatcagccgcacatcggcccagctgtggtccctcaccagtattatggagttactccctggggagtctaccctgccagtcttttccagcagcaagctgccgctgccgctgcagcaactaattcagctaatcaacagaccaccccacaggctcagcaaggacagcagcaggttctccgtggaggagccagccaacgtcctttgaccccaaaccagaaccagcagggacagcaaacggatccccttgtggcagctgcagcagtgaattctgcccttgcatttggacaaggtctggcagcaggcatgccaggttatccggtgttggctcctgctgcttactatgaccaaactggtgcccttgtagtgaatgcaggcgcgagaaatggtcttggagctcctgttcgacttgtagctcctgccccagtcatcattagttcctcagctgcacaagcaggaacacagcagcctcagccccagccccagcagcagcccaataacaacctggcatccagttctttctacggcaacaactctctgaacagcaattcacagagcagctccctcttctcccagggctctgcccagcctgccaacacatccttgggattcggaagtagcagttctctcggcgccaccctgggatccgcccttggagggtttggaacagcagttgcaaactccaacactggcagtggctcccgccgtgactccctgactggcagcagtgacctttataagaggacatcgagcagcttgacccccattggacacagtttttataacggccttagcttttcctcctctcctggacccgtgggcatgcctctccctagtcagggaccaggacattcacagacaccacctccttccctctcttcacatggatcctcttcaagcttaaacctgggaggactcacgaatggcagtggaagatacatctctgctgctccaggcgctgaagccaagtaccgcagtgcaagcagcgcctccagcctcttcagcccgagcagcactcttttctcttcctctcgtttgcgatatggaatgtctgatgtcatgccttctggcaggagcaggcttttggaagattttcgaaacaaccggtaccccaatttacaactgcgggagattgctggacatataatggaattttcccaagaccagcatgggtccagattcattcagctgaaactggagcgtgccacaccagctgagcgccagcttgtcttcaatgaaatcctccaggctgcctaccaactcatggtggatgtgtttggtaattacgtcattcagaagttctttgaatttggcagtcttgaacagaagctggctttggcagaacggattcgaggccacgtcctgtcattggcactacagatgtatggctgccgtgttatccagaaagctcttgagtttattccttcagaccagcagaatgagatggttcgggaactagatggccatgtcttgaagtgtgtgaaagatcagaatggcaatcacgtggttcagaaatgcattgaatgtgtacagccccagtctttgcaatttatcatcgatgcgtttaagggacaggtatttgccttatccacacatccttatggctgccgagtgattcagagaatcctggagcactgtctccctgaccagacactccctattttagaggagcttcaccagcacacagagcagcttgtacaggatcaatatggaaattatgtaatccaacatgtactggagcacggtcgtcctgaggataaaagcaaaattgtagcagaaatccgaggcaatgtacttgtattgagtcagcacaaatttgcaagcaatgttgtggagaagtgtgttactcacgcctcacgtacggagcgcgctgtgctcatcgatgaggtgtgcaccatgaacgacggtccccacagtgccttatacaccatgatgaaggaccagtatgccaactacgtggtccagaagatgattgacgtggcggagccaggccagcggaagatcgtcatgcataagatccggccccacatcgcaactcttcgtaagtacacctatggcaagcacattctggccaagctggagaagtactacatgaagaacggtgttgacttagggcccatctgtggcccccctaatggtatcatctgaggcagtgtcacccgctgttccctcattcccgctgacctcactggcccactggcaaatccaaccagcaaccagaaatgttctagtgtagagtctgagacgggcaagtggttgctccaggattactccctcctccaaaaaaggaatcaaatccacgagtggaaaagcctttgtaaatttaattttattacacataacatgtactattttttttaattgactaattgccctgctgttttactggtgtataggatacttgtacataggtaaccaatgtacatgggaggccacatattttgttcactgttgtatctatatttcacatgtggaaactttcagggtggttggtttaacaaaaaaaaaaagctttaaaaaaaaaagaaaaaaaggaaaaggtttttagctcatttgcctggccggcaagttttgcaaatagctcttccccacctcctcattttagtaaaaaacaaacaaaaacaaaaaaacctgagaagtttgaattgtagttaaatgaccccaaactggcatttaacactgtttataaaaaatatatatatatatatatatatataatgaaaaaggtttcagagttgctaaagcttcagtttgtgacattaagtttatgaaattctaaaaaatgccttttttggagactatattatgctgaagaaggctgttcgtgaggaggagatgcgagcacccagaacgtcttttgaggctgggcgggtgtgattgtttactgcctactggatttttttctattaacattgaaaggtaaaatctgattatttagcatgagaaaaaaaaatccaactctgcttttggtcttgcttctataaatatatagtgtatacttggtgtagactttgcatatatacaaatttgtagtattttcttgttttgatgtctaatctgtatctataatgtaccctagtagtcgaacatacttttgattgtacaattgtacatttgtatacctgtaatgtaaatgtggagaagtttgaatcaacataaacacgttttttggtaagaaaagagaattagccagccctgtgcattcagtgtatattctcaccttttatggtcgtagcatatagtgttgtatattgtaaattgtaatttcaaccagaagtaaatttttttcttttgaaggaataaatgttctttatacagcctagttaatgtttaaaaagaaaaaaatagcttggttttatttgtcatctagtctcaagtatagcgagattctttctaaatgttattcaagattgagttctcactagtgtttttttaatcctaaaaaagtaatgttttgattttgtgacagtcaaaaggacgtgcaaaagtctagccttgcccgagctttccttacaatcagagcccctctcaccttgtaaagtgtgaatcgcccttcccttttgtacagaagatgaactgtattttgcattttgtctacttgtaagtgaatgtaacatactgtcaattttccttgtttgaatatagaattgtaacactacacggtgtacatttccagagccttgtgtatatttccaatgaacttttttgcaagcacacttgtaaccatatgtgtataattaacaaacctgtgtatgcttatgcctgggcaactattttttgtaactcttgtgtagattgtctctaaacaatgtgtgatctttattttgaaaaatacagaactttggaatctg

SEQ ID NO: 81 - DNA, 4981 bp, Homo sapiens
atgttgtcggagtgaaaggtaagggggagcgagagcgccagagagagaagatcggggggctgaaatccatcttcatcctaccgctccgcccgtgttggtggaatgagcgttgcatgtgtcttgaagagaaaagcagtgctttggcaggactctttcagcccccacctgaaacatcaccctcaagaaccagctaatcccaacatgcctgttgttttgacatctggaacagggtcgcaagcgcagccacaaccagctgcaaatcaggctcttgcagctgggactcactccagccctgtcccaggatctataggagttgcaggccgttcccaggacgacgctatggtggactacttctttcagaggcagcatggtgagcagcttgggggaggaggaagtggaggaggcggctataataatagcaaacatcgatggcctactggggataacattcatgcagaacatcaggtgcgttccatggatgaactgaatcatgattttcaagcacttgctctggagggaagagcgatgggagagcagctcttgccaggtaaaaagttttgggaaacagatgaatccagcaaagatggaccaaaaggaatattcctgggtgatcaatggcgagacagtgcctggggaacatcagatcattcagtttcccagccaatcatggtgcagagaagacctggtcagagtttccatgtgaacagtgaggtcaattctgtactgtccccacgatcggagagtgggggactaggcgttagcatggtggagtatgtgttgagctcatccccgggcgattcctgtctaagaaaaggaggatttggcccaagggatgcagacagtgatgaaaacgacaaaggtgaaaagaagaacaagggtacgtttgatggagataagctaggagatttgaaggaggagggtgatgtgatggacaagaccaatggtttaccagtgcagaatgggattgatgcagacgtcaaagattttagccgtacccctggtaattgccagaactctgctaatgaagtggatcttctgggtccaaaccagaatggttctgagggcttagcccagctgaccagcaccaatggtgccaagcctgtggaggatttctccaacatggagtcccagagtgtccccttggaccccatggaacatgtgggcatggagcctcttcagtttgattattcaggcacgcaggtacctgtggactcagcagcagcaactgtgggactttttgactacaattctcaacaacagctgttccaaagacctaatgcgcttgctgtccagcagttgacagctgctcagcagcagcagtatgcactggcagctgctcatcagccgcacatcggcccagctgtggtccctcaccagtattatggagttactccctggggagtctaccctgccagtcttttccagcagcaagctgccgctgccgctgcagcaactaattcagctaatcaacagaccaccccacaggctcagcaaggacagcagcaggttctccgtggaggagccagccaacgtcctttgaccccaaaccagaaccagcagggacagcaaacggatccccttgtggcagctgcagcagtgaattctgcccttgcatttggacaaggtctggcagcaggcatgccaggttatccggtgttggctcctgctgcttactatgaccaaactggtgcccttgtagtgaatgcaggcgcgagaaatggtcttggagctcctgttcgacttgtagctcctgccccagtcatcattagttcctcagctgcacaagcaggaacacagcagcctcagccccagccccagcagcagcccaataacaacctggcatccagttctttctacggcaacaactctctgaacagcaattcacagagcagctccctcttctcccagggctctgcccagcctgccaacacatccttgggattcggaagtagcagttctctcggcgccaccctgggatccgcccttggagggtttggaacagcagttgcaaactccaacactggcagtggctcccgccgtgactccctgactggcagcagtgacctttataagaggacatcgagcagcttgacccccattggacacagtttttataacggccttagcttttcctcctctcctggacccgtgggcatgcctctccctagtcagggaccaggacattcacagacaccacctccttccctctcttcacatggatcctcttcaagcttaaacctgggaggactcacgaatggcagtggaagatacatctctgctgctccaggcgctgaagccaagtaccgcagtgcaagcagcgcctccagcctcttcagcccgagcagcactcttttctcttcctctcgtttgcgatatggaatgtctgatgtcatgccttctggcaggagcaggcttttggaagattttcgaaacaaccggtaccccaatttacaactgcgggagattgctggacatataatggaattttcccaagaccagcatgggtccagattcattcagctgaaactggagcgtgccacaccagctgagcgccagcttgtcttcaatgaaatcctccaggctgcctaccaactcatggtggatgtgtttggtaattacgtcattcagaagttctttgaatttggcagtcttgaacagaagctggctttggcagaacggattcgaggccacgtcctgtcattggcactacagatgtatggctgccgtgttatccagaaagctcttgagtttattccttcagaccagcagaatgagatggttcgggaactagatggccatgtcttgaagtgtgtgaaagatcagaatggcaatcacgtggttcagaaatgcattgaatgtgtacagccccagtctttgcaatttatcatcgatgcgtttaagggacaggtatttgccttatccacacatccttatggctgccgagtgattcagagaatcctggagcactgtctccctgaccagacactccctattttagaggagcttcaccagcacacagagcagcttgtacaggatcaatatggaaattatgtaatccaacatgtactggagcacggtcgtcctgaggataaaagcaaaattgtagcagaaatccgaggcaatgtacttgtattgagtcagcacaaatttgcaagcaatgttgtggagaagtgtgttactcacgcctcacgtacggagcgcgctgtgctcatcgatgaggtgtgcaccatgaacgacggtccccacagtgccttatacaccatgatgaaggaccagtatgccaactacgtggtccagaagatgattgacgtggcggagccaggccagcggaagatcgtcatgcataagatccggccccacatcgcaactcttcgtaagtacacctatggcaagcacattctggccaagctggagaagtactacatgaagaacggtgttgacttagggcccatctgtggcccccctaatggtatcatctgaggcagtgtcacccgctgttccctcattcccgctgacctcactggcccactggcaaatccaaccagcaaccagaaatgttctagtgtagagtctgagacgggcaagtggttgctccaggattactccctcctccaaaaaaggaatcaaatccacgagtggaaaagcctttgtaaatttaattttattacacataacatgtactattttttttaattgactaattgccctgctgttttactggtgtataggatacttgtacataggtaaccaatgtacatgggaggccacatattttgttcactgttgtatctatatttcacatgtggaaactttcagggtggttggtttaacaaaaaaaaaaagctttaaaaaaaaaagaaaaaaaggaaaaggtttttagctcatttgcctggccggcaagttttgcaaatagctcttccccacctcctcattttagtaaaaaacaaacaaaaacaaaaaaacctgagaagtttgaattgtagttaaatgaccccaaactggcatttaacactgtttataaaaaatatatatatatatatatatatataatgaaaaaggtttcagagttgctaaagcttcagtttgtgacattaagtttatgaaattctaaaaaatgccttttttggagactatattatgctgaagaaggctgttcgtgaggaggagatgcgagcacccagaacgtcttttgaggctgggcgggtgtgattgtttactgcctactggatttttttctattaacattgaaaggtaaaatctgattatttagcatgagaaaaaaaaatccaactctgcttttggtcttgcttctataaatatatagtgtatacttggtgtagactttgcatatatacaaatttgtagtattttcttgttttgatgtctaatctgtatctataatgtaccctagtagtcgaacatacttttgattgtacaattgtacatttgtatacctgtaatgtaaatgtggagaagtttgaatcaacataaacacgttttttggtaagaaaagagaattagccagccctgtgcattcagtgtatattctcaccttttatggtcgtagcatatagtgttgtatattgtaaattgtaatttcaaccagaagtaaatttttttcttttgaaggaataaatgttctttatacagcctagttaatgtttaaaaagaaaaaaatagcttggttttatttgtcatctagtctcaagtatagcgagattctttctaaatgttattcaagattgagttctcactagtgtttttttaatcctaaaaaagtaatgttttgattttgtgacagtcaaaaggacgtgcaaaagtctagccttgcccgagctttccttacaatcagagcccctctcaccttgtaaaaaacctgtgtatgcttatgcctgggcaactattttttgtaactcttgtgtagattgtctctaaacaatgtgtgatctttattttgaaaaatacagaactttggaatctg

SEQ ID NO: 82 - protein, 1056 aa, Homo sapiens
MSVACVLKRKAVLWQDSFSPHLKHHPQEPANPNMPVVLTSGTGSQAQPQPAANQALAAGTHSSPVPGSIGVAGRSQDDAMVDYFFQRQHGEQLGGGGSGGGGYNNSKHRWPTGDNIHAEHQVRSMDELNHDFQALALEGRAMGEGPRDADSDENDKGEKKNKGTFDGDKLGDLKEEGDVMDKTNGLPVQNGIDADVKDFSRTPGNCQNSANEVDLLGPNQNGSEGLAQLTSTNGAKPVEDFSNMESQSVPLDPMEHVGMEPLQFDYSGTQVPVDSAAATVGLFDYNSQQQLFQRPNALAVQQLTAAQQQQYALAAAHQPHIGPAVVPHQYYGVTPWGVYPASLFQQQAAAAAAATNSANQQTTPQAQQGQQQVLRGGASQRPLTPNQNQQGQQTDPLVAAAAVNSALAFGQGLAAGMPGYPVLAPAAYYDQTGALVVNAGARNGLGAPVRLVAPAPVIISSSAAQAAVAAAAASANGAAGGLAGTTNGPFRPLGTQQPQPQPQQQPNNNLASSSFYGNNSLNSNSQSSSLFSQGSAQPANTSLGFGSSSSLGATLGSALGGFGTAVANSNTGSGSRRDSLTGSSDLYKRTSSSLTPIGHSFYNGLSFSSSPGPVGMPLPSQGPGHSQTPPPSLSSHGSSSSLNLGGLTNGSGRYISAAPGAEAKYRSASSASSLFSPSSTLFSSSRLRYGMSDVMPSGRSRLLEDFRNNRYPNLQLREIAGHIMEFSQDQHGSRFIQLKLERATPAERQLVFNEILQAAYQLMVDVFGNYVIQKFFEFGSLEQKLALAERIRGHVLSLALQMYGCRVIQKALEFIPSDQQNEMVRELDGHVLKCVKDQNGNHVVQKCIECVQPQSLQFIIDAFKGQVFALSTHPYGCRVIQRILEHCLPDQTLPILEELHQHTEQLVQDQYGNYVIQHVLEHGRPEDKSKIVAEIRGNVLVLSQHKFASNVVEKCVTHASRTERAVLIDEVCTMNDGPHSALYTMMKDQYANYVVQKMIDVAEPGQRKIVMHKIRPHIATLRKYTYGKHILAKLEKYYMKNGVDLGPICGPPNGII

SEQ ID NO: 83 - protein, 1032 aa, Homo sapiens
MVRSMDELNHDFQALALEGRAMGEQLLPGKKFWETDESSKDGPKGIFLGDQWRDSAWGTSDHSVSQPIMVQRRPGQSFHVNSEVNSVLSPRSESGGLGVSMVEYVLSSSPGDSCLRKGGFGPRDADSDENDKGEKKNKGTFDGDKLGDLKEEGDVMDKTNGLPVQNGIDADVKDFSRTPGNCQNSANEVDLLGPNQNGSEGLAQLTSTNGAKPVEDFSNMESQSVPLDPMEHVGMEPLQFDYSGTQVPVDSAAATVGLFDYNSQQQLFQRPNALAVQQLTAAQQQQYALAAAHQPHIGPAVVPHQYYGVTPWGVYPASLFQQQAAAAAAATNSANQQTTPQAQQGQQQVLRGGASQRPLTPNQNQQGQQTDPLVAAAAVNSALAFGQGLAAGMPGYPVLAPAAYYDQTGALVVNAGARNGLGAPVRLVAPAPVIISSSAAQAAVAAAAASANGAAGGLAGTTNGPFRPLGTQQPQPQPQQQPNNNLASSSFYGNNSLNSNSQSSSLFSQGSAQPANTSLGFGSSSSLGATLGSALGGFGTAVANSNTGSGSRRDSLTGSSDLYKRTSSSLTPIGHSFYNGLSFSSSPGPVGMPLPSQGPGHSQTPPPSLSSHGSSSSLNLGGLTNGSGRYISAAPGAEAKYRSASSASSLFSPSSTLFSSSRLRYGMSDVMPSGRSRLLEDFRNNRYPNLQLREIAGHIMEFSQDQHGSRFIQLKLERATPAERQLVFNEILQAAYQLMVDVFGNYVIQKFFEFGSLEQKLALAERIRGHVLSLALQMYGCRVIQKALEFIPSDQQNEMVRELDGHVLKCVKDQNGNHVVQKCIECVQPQSLQFIIDAFKGQVFALSTHPYGCRVIQRILEHCLPDQTLPILEELHQHTEQLVQDQYGNYVIQHVLEHGRPEDKSKIVAEIRGNVLVLSQHKFASNVVEKCVTHASRTERAVLIDEVCTMNDGPHSALYTMMKDQYANYVVQKMIDVAEPGQRKIVMHKIRPHIATLRKYTYGKHILAKLEKYYMKNGVDLGPICGPPNGII

SEQ ID NO: 84 - protein, 1063 aa, Homo sapiens
MSVACVLKRKAVLWQDSFSPHLKHHPQEPANPNMPVVLTSGTGSQAQPQPAANQALAAGTHSSPVPGSIGVAGRSQDDAMVDYFFQRQHGEQLGGGGSGGGGYNNSKHRWPTGDNIHAEHQVRSMDELNHDFQALALEGRAMGEQLLPGKKFWETDESSKDGPKGIFLGDQWRDSAWGTSDHSVSQPIMVQRRPGQSFHVNSEVNSVLSPRSESGGLGVSMVEYVLSSSPGDSCLRKGGFLFQRPNALAVQQLTAAQQQQYALAAAHQPHIGLAPAAFVPNPYIISAAPPGTDPYTAGLAAAATLGPAVVPHQYYGVTPWGVYPASLFQQQAAAAAAATNSANQQTTPQAQQGQQQVLRGGASQRPLTPNQNQQGQQTDPLVAAAAVNSALAFGQGLAAGMPGYPVLAPAAYYDQTGALVVNAGARNGLGAPVRLVAPAPVIISSSAAQAGERTSEWTPARDLKVATDSEILKTVAAAAASANGAAGGLAGTTNGPFRPLGTQQPQPQPQQQPNNNLASSSFYGNNSLNSNSQSSSLFSQGSAQPANTSLGFGSSSSLGATLGSALGGFGTAVANSNTGSGSRRDSLTGSSDLYKRTSSSLTPIGHSFYNGLSFSSSPGPVGMPLPSQGPGHSQTPPPSLSSHGSSSSLNLGGLTNGSGRYISAAPGAEAKYRSASSASSLFSPSSTLFSSSRLRYGMSDVMPSGRSRLLEDFRNNRYPNLQLREIAGHIMEFSQDQHGSRFIQLKLERATPAERQLVFNEILQAAYQLMVDVFGNYVIQKFFEFGSLEQKLALAERIRGHVLSLALQMYGCRVIQKALEFIPSDQQNEMVRELDGHVLKCVKDQNGNHVVQKCIECVQPQSLQFIIDAFKGQVFALSTHPYGCRVIQRILEHCLPDQTLPILEELHQHTEQLVQDQYGNYVIQHVLEHGRPEDKSKIVAEIRGNVLVLSQHKFASNVVEKCVTHASRTERAVLIDEVCTMNDGPHSALYTMMKDQYANYVVQKMIDVAEPGQRKIVMHKIRPHIATLRKYTYGKHILAKLEKYYMKNGVDLGPICGPPNGII

SEQ ID NO: 85 - protein, 1159 aa, Homo sapiens
MSVACVLKRKAVLWQDSFSPHLKHHPQEPANPNMPVVLTSGTGSQAQPQPAANQALAAGTHSSPVPGSIGVAGRSQDDAMVDYFFQRQHGEQLGGGGSGGGGYNNSKHRWPTGDNIHAEHQVRSMDELNHDFQALALEGRAMGEQLLPGKKFWETDESSKDGPKGIFLGDQWRDSAWGTSDHSVSQPIMVQRRPGQSFHVNSEVNSVLSPRSESGGLGVSMVEYVLSSSPGDSCLRKGGFGPRDADSDENDKGEKKNKGTFDGDKLGDLKEEGDVMDKTNGLPVQNGIDADVKDFSRTPGNCQNSANEVDLLGPNQNGSEGLAQLTSTNGAKPVEDFSNMESQSVPLDPMEHVGMEPLQFDYSGTQVPVDSAAATVGLFDYNSQQQLFQRPNALAVQQLTAAQQQQYALAAAHQPHIGLAPAAFVPNPYIISAAPPGTDPYTAGLAAAATLGPAVVPHQYYGVTPWGVYPASLFQQQAAAAAAATNSANQQTTPQAQQGQQQVLRGGASQRPLTPNQNQQGQQTDPLVAAAAVNSALAFGQGLAAGMPGYPVLAPAAYYDQTGALVVNAGARNGLGAPVRLVAPAPVIISSSAAQAGTQQPQPQPQQQPNNNLASSSFYGNNSLNSNSQSSSLFSQGSAQPANTSLGFGSSSSLGATLGSALGGFGTAVANSNTGSGSRRDSLTGSSDLYKRTSSSLTPIGHSFYNGLSFSSSPGPVGMPLPSQGPGHSQTPPPSLSSHGSSSSLNLGGLTNGSGRYISAAPGAEAKYRSASSASSLFSPSSTLFSSSRLRYGMSDVMPSGRSRLLEDFRNNRYPNLQLREIAGHIMEFSQDQHGSRFIQLKLERATPAERQLVFNEILQAAYQLMVDVFGNYVIQKFFEFGSLEQKLALAERIRGHVLSLALQMYGCRVIQKALEFIPSDQQNEMVRELDGHVLKCVKDQNGNHVVQKCIECVQPQSLQFIIDAFKGQVFALSTHPYGCRVIQRILEHCLPDQTLPILEELHQHTEQLVQDQYGNYVIQHVLEHGRPEDKSKIVAEIRGNVLVLSQHKFASNVVEKCVTHASRTERAVLIDEVCTMNDGPHSALYTMMKDQYANYVVQKMIDVAEPGQRKIVMHKIRPHIATLRKYTYGKHILAKLEKYYMKNGVDLGPICGPPNGII

SEQ ID NO: 86 - protein, 130 aa, Homo sapiens
MSVACVLKRKAVLWQDSFSPHLKHHPQEPANPNMPVVLTSGTGSQAQPQPAANQALAAGTHSSPVPGSIGVAGRSQDDAMVDYFFQRQHGEQLGGGGSGGGGYNNSKHRWPTGDNIHAEHQQRSHHCTPA

SEQ ID NO: 87 - protein, 1039 aa, Homo sapiens
MVRSMDELNHDFQALALEGRAMGEQLLPGKKFWETDESSKDGPKGIFLGDQWRDSAWGTSDHSVSQPIMVQRRPGQSFHVNSEVNSVLSPRSESGGLGVSMVEYVLSSSPGDSCLRKGGFGPRDADSDENDKGEKKNKGTFDGDKLGDLKEEGDVMDKTNGLPVQNGIDADVKDFSRTPGNCQNSANEVDLLGPNQNGSEGLAQLTSTNGAKPVEDFSNMESQSVPLDPMEHVGMEPLQFDYSGTQVPVDSAAATVGLFDYNSQQQLFQRPNALAVQQLTAAQQQQYALAAAHQPHIGLAPAAFVPNPYIISAAPPGTDPYTAGLAAAATLGPAVVPHQYYGVTPWGVYPASLFQQQAAAAAAATNSANQQTTPQAQQGQQQVLRGGASQRPLTPNQNQQGQQTDPLVAAAAVNSALAFGQGLAAGMPGYPVLAPAAYYDQTGALVVNAGARNGLGAPVRLVAPAPVIISSSAAQAGTQQPQPQPQQQPNNNLASSSFYGNNSLNSNSQSSSLFSQGSAQPANTSLGFGSSSSLGATLGSALGGFGTAVANSNTGSGSRRDSLTGSSDLYKRTSSSLTPIGHSFYNGLSFSSSPGPVGMPLPSQGPGHSQTPPPSLSSHGSSSSLNLGGLTNGSGRYISAAPGAEAKYRSASSASSLFSPSSTLFSSSRLRYGMSDVMPSGRSRLLEDFRNNRYPNLQLREIAGHIMEFSQDQHGSRFIQLKLERATPAERQLVFNEILQAAYQLMVDVFGNYVIQKFFEFGSLEQKLALAERIRGHVLSLALQMYGCRVIQKALEFIPSDQQNEMVRELDGHVLKCVKDQNGNHVVQKCIECVQPQSLQFIIDAFKGQVFALSTHPYGCRVIQRILEHCLPDQTLPILEELHQHTEQLVQDQYGNYVIQHVLEHGRPEDKSKIVAEIRGNVLVLSQHKFASNVVEKCVTHASRTERAVLIDEVCTMNDGPHSALYTMMKDQYANYVVQKMIDVAEPGQRKIVMHKIRPHIATLRKYTYGKHILAKLEKYYMKNGVDLGPICGPPNGII

SEQ ID NO: 88 - protein, 606 aa, Homo sapiens
MWPVPFIAKRFAFFFIAVAAAAASANGAAGGLAGTTNGPFRPLGTQQPQPQPQQQPNNNLASSSFYGNNSLNSNSQSSSLFSQGSAQPANTSLGFGSSSSLGATLGSALGGFGTAVANSNTGSGSRRDSLTGSSDLYKRTSSSLTPIGHSFYNGLSFSSSPGPVGMPLPSQGPGHSQTPPPSLSSHGSSSSLNLGGLTNGSGRYISAAPGAEAKYRSASSASSLFSPSSTLFSSSRLRYGMSDVMPSGRSRLLEDFRNNRYPNLQLREIAGHIMEFSQDQHGSRFIQLKLERATPAERQLVFNEILQAAYQLMVDVFGNYVIQKFFEFGSLEQKLALAERIRGHVLSLALQMYGCRVIQKALEFIPSDQQNEMVRELDGHVLKCVKDQNGNHVVQKCIECVQPQSLQFIIDAFKGQVFALSTHPYGCRVIQRILEHCLPDQTLPILEELHQHTEQLVQDQYGNYVIQHVLEHGRPEDKSKIVAEIRGNVLVLSQHKFASNVVEKCVTHASRTERAVLIDEVCTMNDGPHSALYTMMKDQYANYVVQKMIDVAEPGQRKIVMHKIRPHIATLRKYTYGKHILAKLEKYYMKNGVDLGPICGPPNGII

SEQ ID NO: 89 - protein, 476 aa, Homo sapiens
VVGVKGKGERERQREKIGGLKSIFILPLRPPGPVGMPLPSQGPGHSQTPPPSLSSHGSSSSLNLGGLTNGSGRYISAAPGAEAKYRSASSASSLFSPSSTLFSSSRLRYGMSDVMPSGRSRLLEDFRNNRYPNLQLREIAGHIMEFSQDQHGSRFIQLKLERATPAERQLVFNEILQAAYQLMVDVFGNYVIQKFFEFGSLEQKLALAERIRGHVLSLALQMYGCRVIQKALEFIPSDQQNEMVRELDGHVLKCVKDQNGNHVVQKCIECVQPQSLQFIIDAFKGQVFALSTHPYGCRVIQRILEHCLPDQTLPILEELHQHTEQLVQDQYGNYVIQHVLEHGRPEDKSKIVAEIRGNVLVLSQHKFASNVVEKCVTHASRTERAVLIDEVCTMNDGPHSALYTMMKDQYANYVVQKMIDVAEPGQRKIVMHKIRPHIATLRKYTYGKHILAKLEKYYMKNGVDLGPICGPPNGII

SEQ ID NO: 90 - protein, 1186 aa, Homo sapiens
MSVACVLKRKAVLWQDSFSPHLKHHPQEPANPNMPVVLTSGTGSQAQPQPAANQALAAGTHSSPVPGSIGVAGRSQDDAMVDYFFQRQHGEQLGGGGSGGGGYNNSKHRWPTGDNIHAEHQVRSMDELNHDFQALALEGRAMGEQLLPGKKFWETDESSKDGPKGIFLGDQWRDSAWGTSDHSVSQPIMVQRRPGQSFHVNSEVNSVLSPRSESGGLGVSMVEYVLSSSPGDSCLRKGGFGPRDADSDENDKGEKKNKGTFDGDKLGDLKEEGDVMDKTNGLPVQNGIDADVKDFSRTPGNCQNSANEVDLLGPNQNGSEGLAQLTSTNGAKPVEDFSNMESQSVPLDPMEHVGMEPLQFDYSGTQVPVDSAAATVGLFDYNSQQQLFQRPNALAVQQLTAAQQQQYALAAAHQPHIGLAPAAFVPNPYIISAAPPGTDPYTAGLAAAATLGPAVVPHQYYGVTPWGVYPASLFQQQAAAAAAATNSANQQTTPQAQQGQQQVLRGGASQRPLTPNQNQQGQQTDPLVAAAAVNSALAFGQGLAAGMPGYPVLAPAAYYDQTGALVVNAGARNGLGAPVRLVAPAPVIISSSAAQAAVAAAAASANGAAGGLAGTTNGPFRPLGTQQPQPQPQQQPNNNLASSSFYGNNSLNSNSQSSSLFSQGSAQPANTSLGFGSSSSLGATLGSALGGFGTAVANSNTGSGSRRDSLTGSSDLYKRTSSSLTPIGHSFYNGLSFSSSPGPVGMPLPSQGPGHSQTPPPSLSSHGSSSSLNLGGLTNGSGRYISAAPGAEAKYRSASSASSLFSPSSTLFSSSRLRYGMSDVMPSGRSRLLEDFRNNRYPNLQLREIAGHIMEFSQDQHGSRFIQLKLERATPAERQLVFNEILQAAYQLMVDVFGNYVIQKFFEFGSLEQKLALAERIRGHVLSLALQMYGCRVIQKALEFIPSDQQNEMVRELDGHVLKCVKDQNGNHVVQKCIECVQPQSLQFIIDAFKGQVFALSTHPYGCRVIQRILEHCLPDQTLPILEELHQHTEQLVQDQYGNYVIQHVLEHGRPEDKSKIVAEIRGNVLVLSQHKFASNVVEKCVTHASRTERAVLIDEVCTMNDGPHSALYTMMKDQYANYVVQKMIDVAEPGQRKIVMHKIRPHIATLRKYTYGKHILAKLEKYYMKNGVDLGPICGPPNGII

SEQ ID NO: 91 - protein, 225 aa, Homo sapiens
GRGARRAPRRAARAAPGAMGKCSGRCTLVAFCCLQLVAALERQIFDFLGYQWAPILANFLHIMAVILGIFGTVQYRSRYLILYAAWLVLWVGWNAFIICFYLEVGQLSQDRDFIMTFNTSLHRSWWMENGPGCLVTPVLNSRLALEDHHVISVTGCLLDYPYIEALSSALQIFLALFGFVFACYVSKVFLEEEDSFDFIGGFDSYGYQAPQKTSHLQLQPLYTSG

SEQ ID NO: 92 - protein, 1152 aa, Homo sapiens
MSVACVLKRKAVLWQDSFSPHLKHHPQEPANPNMPVVLTSGTGSQAQPQPAANQALAAGTHSSPVPGSIGVAGRSQDDAMVDYFFQRQHGEQLGGGGSGGGGYNNSKHRWPTGDNIHAEHQVRSMDELNHDFQALALEGRAMGEQLLPGKKFWETDESSKDGPKGIFLGDQWRDSAWGTSDHSVSQPIMVQRRPGQSFHVNSEVNSVLSPRSESGGLGVSMVEYVLSSSPGDSCLRKGGFGPRDADSDENDKGEKKNKGTFDGDKLGDLKEEGDVMDKTNGLPVQNGIDADVKDFSRTPGNCQNSANEVDLLGPNQNGSEGLAQLTSTNGAKPVEDFSNMESQSVPLDPMEHVGMEPLQFDYSGTQVPVDSAAATVGLFDYNSQQQLFQRPNALAVQQLTAAQQQQYALAAAHQPHIGPAVVPHQYYGVTPWGVYPASLFQQQAAAAAAATNSANQQTTPQAQQGQQQVLRGGASQRPLTPNQNQQGQQTDPLVAAAAVNSALAFGQGLAAGMPGYPVLAPAAYYDQTGALVVNAGARNGLGAPVRLVAPAPVIISSSAAQAAVAAAAASANGAAGGLAGTTNGPFRPLGTQQPQPQPQQQPNNNLASSSFYGNNSLNSNSQSSSLFSQGSAQPANTSLGFGSSSSLGATLGSALGGFGTAVANSNTGSGSRRDSLTGSSDLYKRTSSSLTPIGHSFYNGLSFSSSPGPVGMPLPSQGPGHSQTPPPSLSSHGSSSSLNLGGLTNGSGRYISAAPGAEAKYRSASSASSLFSPSSTLFSSSRLRYGMSDVMPSGRSRLLEDFRNNRYPNLQLREIAGHIMEFSQDQHGSRFIQLKLERATPAERQLVFNEILQAAYQLMVDVFGNYVIQKFFEFGSLEQKLALAERIRGHVLSLALQMYGCRVIQKALEFIPSDQQNEMVRELDGHVLKCVKDQNGNHVVQKCIECVQPQSLQFIIDAFKGQVFALSTHPYGCRVIQRILEHCLPDQTLPILEELHQHTEQLVQDQYGNYVIQHVLEHGRPEDKSKIVAEIRGNVLVLSQHKFASNVVEKCVTHASRTERAVLIDEVCTMNDGPHSALYTMMKDQYANYVVQKMIDVAEPGQRKIVMHKIRPHIATLRKYTYGKHILAKLEKYYMKNGVDLGPICGPPNGII

SEQ ID NO: 93 - protein, 928 aa, Homo sapiens
MIFKHLLWREERWESRTPGNCQNSANEVDLLGPNQNGSEGLAQLTSTNGAKPVEDFSNMESQSVPLDPMEHVGMEPLQFDYSGTQVPVDSAAATVGLFDYNSQQQLFQRPNALAVQQLTAAQQQQYALAAAHQPHIGLAPAAFVPNPYIISAAPPGTDPYTAGLAAAATLGPAVVPHQYYGVTPWGVYPASLFQQQAAAAAAATNSANQQTTPQAQQGQQQVLRGGASQRPLTPNQNQQGQQTDPLVAAAAVNSALAFGQGLAAGMPGYPVLAPAAYYDQTGALVVNAGARNGLGAPVRLVAPAPVIISSSAAQAGERTSEWTPARDLKVATDSEILKTVAAAAASANGAAGGLAGTTNGPFRPLGTQQPQPQPQQQPNNNLASSSFYGNNSLNSNSQSSSLFSQGSAQPANTSLGFGSSSSLGATLGSALGGFGTAVANSNTGSGSRRDSLTGSSDLYKRTSSSLTPIGHSFYNGLSFSSSPGPVGMPLPSQGPGHSQTPPPSLSSHGSSSSLNLGGLTNGSGRYISAAPGAEAKYRSASSASSLFSPSSTLFSSSRLRYGMSDVMPSGRSRLLEDFRNNRYPNLQLREIAGHIMEFSQDQHGSRFIQLKLERATPAERQLVFNEILQAAYQLMVDVFGNYVIQKFFEFGSLEQKLALAERIRGHVLSLALQMYGCRVIQKALEFIPSDQQNEMVRELDGHVLKCVKDQNGNHVVQKCIECVQPQSLQFIIDAFKGQVFALSTHPYGCRVIQRILEHCLPDQTLPILEELHQHTEQLVQDQYGNYVIQHVLEHGRPEDKSKIVAEIRGNVLVLSQHKFASNVVEKCVTHASRTERAVLIDEVCTMNDGPHSALYTMMKDQYANYVVQKMIDVAEPGQRKIVMHKIRPHIATLRKYTYGKHILAKLEKYYMKNGVDLGPICGPPNGII

SEQ ID NO: 94 - protein, 442 aa, Homo sapiens
AAAEQEGRRGVRPAQPPEPWASAAGAARWSPSAACSCGRYISAAPGAEAKYRSASSASSLFSPSSTLFSSSRLRYGMSDVMPSGRSRLLEDFRNNRYPNLQLREIAGHIMEFSQDQHGSRFIQLKLERATPAERQLVFNEILQAAYQLMVDVFGNYVIQKFFEFGSLEQKLALAERIRGHVLSLALQMYGCRVIQKALEFIPSDQQNEMVRELDGHVLKCVKDQNGNHVVQKCIECVQPQSLQFIIDAFKGQVFALSTHPYGCRVIQRILEHCLPDQTLPILEELHQHTEQLVQDQYGNYVIQHVLEHGRPEDKSKIVAEIRGNVLVLSQHKFASNVVEKCVTHASRTERAVLIDEVCTMNDGPHSALYTMMKDQYANYVVQKMIDVAEPGQRKIVMHKIRPHIATLRKYTYGKHILAKLEKYYMKNGVDLGPICGPPNGII

SEQ ID NO: 95 - protein, 871 aa, Homo sapiens
MIFKHLLWREERWESRTPGNCQNSANEVDLLGPNQNGSEGLAQLTSTNGAKPVEDFSNMESQSVPLDPMEHVGMEPLQFDYSGTQVPVDSAAATVGLFDYNSQQQLFQRPNALAVQQLTAAQQQQYALAAAHQPHIGPAVVPHQYYGVTPWGVYPASLFQQQAAAAAAATNSANQQTTPQAQQGQQQVLRGGASQRPLTPNQNQQGQQTDPLVAAAAVNSALAFGQGLAAGMPGYPVLAPAAYYDQTGALVVNAGARNGLGAPVRLVAPAPVIISSSAAQAAVAAAAASANGAAGGLAGTTNGPFRPLGTQQPQPQPQQQPNNNLASSSFYGNNSLNSNSQSSSLFSQGSAQPANTSLGFGSSSSLGATLGSALGGFGTAVANSNTGSGSRRDSLTGSSDLYKRTSSSLTPIGHSFYNGLSFSSSPGPVGMPLPSQGPGHSQTPPPSLSSHGSSSSLNLGGLTNGSGRYISAAPGAEAKYRSASSASSLFSPSSTLFSSSRLRYGMSDVMPSGRSRLLEDFRNNRYPNLQLREIAGHIMEFSQDQHGSRFIQLKLERATPAERQLVFNEILQAAYQLMVDVFGNYVIQKFFEFGSLEQKLALAERIRGHVLSLALQMYGCRVIQKALEFIPSDQQNEMVRELDGHVLKCVKDQNGNHVVQKCIECVQPQSLQFIIDAFKGQVFALSTHPYGCRVIQRILEHCLPDQTLPILEELHQHTEQLVQDQYGNYVIQHVLEHGRPEDKSKIVAEIRGNVLVLSQHKFASNVVEKCVTHASRTERAVLIDEVCTMNDGPHSALYTMMKDQYANYVVQKMIDVAEPGQRKIVMHKIRPHIATLRKYTYGKHILAKLEKYYMKNGVDLGPICGPPNGII

SEQ ID NO: 96 - protein, 1209 aa, Homo sapiens
MSVACVLKRKAVLWQDSFSPHLKHHPQEPANPNMPVVLTSGTGSQAQPQPAANQALAAGTHSSPVPGSIGVAGRSQDDAMVDYFFQRQHGEQLGGGGSGGGGYNNSKHRWPTGDNIHAEHQVRSMDELNHDFQALALEGRAMGEQLLPGKKFWETDESSKDGPKGIFLGDQWRDSAWGTSDHSVSQPIMVQRRPGQSFHVNSEVNSVLSPRSESGGLGVSMVEYVLSSSPGDSCLRKGGFGPRDADSDENDKGEKKNKGTFDGDKLGDLKEEGDVMDKTNGLPVQNGIDADVKDFSRTPGNCQNSANEVDLLGPNQNGSEGLAQLTSTNGAKPVEDFSNMESQSVPLDPMEHVGMEPLQFDYSGTQVPVDSAAATVGLFDYNSQQQLFQRPNALAVQQLTAAQQQQYALAAAHQPHIGLAPAAFVPNPYIISAAPPGTDPYTAGLAAAATLGPAVVPHQYYGVTPWGVYPASLFQQQAAAAAAATNSANQQTTPQAQQGQQQVLRGGASQRPLTPNQNQQGQQTDPLVAAAAVNSALAFGQGLAAGMPGYPVLAPAAYYDQTGALVVNAGARNGLGAPVRLVAPAPVIISSSAAQAGERTSEWTPARDLKVATDSEILKTVAAAAASANGAAGGLAGTTNGPFRPLGTQQPQPQPQQQPNNNLASSSFYGNNSLNSNSQSSSLFSQGSAQPANTSLGFGSSSSLGATLGSALGGFGTAVANSNTGSGSRRDSLTGSSDLYKRTSSSLTPIGHSFYNGLSFSSSPGPVGMPLPSQGPGHSQTPPPSLSSHGSSSSLNLGGLTNGSGRYISAAPGAEAKYRSASSASSLFSPSSTLFSSSRLRYGMSDVMPSGRSRLLEDFRNNRYPNLQLREIAGHIMEFSQDQHGSRFIQLKLERATPAERQLVFNEILQAAYQLMVDVFGNYVIQKFFEFGSLEQKLALAERIRGHVLSLALQMYGCRVIQKALEFIPSDQQNEMVRELDGHVLKCVKDQNGNHVVQKCIECVQPQSLQFIIDAFKGQVFALSTHPYGCRVIQRILEHCLPDQTLPILEELHQHTEQLVQDQYGNYVIQHVLEHGRPEDKSKIVAEIRGNVLVLSQHKFASNVVEKCVTHASRTERAVLIDEVCTMNDGPHSALYTMMKDQYANYVVQKMIDVAEPGQRKIVMHKIRPHIATLRKYTYGKHILAKLEKYYMKNGVDLGPICGPPNGII

SEQ ID NO: 97 - protein, 1125 aa, Homo sapiens
MSVACVLKRKAVLWQDSFSPHLKHHPQEPANPNMPVVLTSGTGSQAQPQPAANQALAAGTHSSPVPGSIGVAGRSQDDAMVDYFFQRQHGEQLGGGGSGGGGYNNSKHRWPTGDNIHAEHQVRSMDELNHDFQALALEGRAMGEQLLPGKKFWETDESSKDGPKGIFLGDQWRDSAWGTSDHSVSQPIMVQRRPGQSFHVNSEVNSVLSPRSESGGLGVSMVEYVLSSSPGDSCLRKGGFGPRDADSDENDKGEKKNKGTFDGDKLGDLKEEGDVMDKTNGLPVQNGIDADVKDFSRTPGNCQNSANEVDLLGPNQNGSEGLAQLTSTNGAKPVEDFSNMESQSVPLDPMEHVGMEPLQFDYSGTQVPVDSAAATVGLFDYNSQQQLFQRPNALAVQQLTAAQQQQYALAAAHQPHIGPAVVPHQYYGVTPWGVYPASLFQQQAAAAAAATNSANQQTTPQAQQGQQQVLRGGASQRPLTPNQNQQGQQTDPLVAAAAVNSALAFGQGLAAGMPGYPVLAPAAYYDQTGALVVNAGARNGLGAPVRLVAPAPVIISSSAAQAGTQQPQPQPQQQPNNNLASSSFYGNNSLNSNSQSSSLFSQGSAQPANTSLGFGSSSSLGATLGSALGGFGTAVANSNTGSGSRRDSLTGSSDLYKRTSSSLTPIGHSFYNGLSFSSSPGPVGMPLPSQGPGHSQTPPPSLSSHGSSSSLNLGGLTNGSGRYISAAPGAEAKYRSASSASSLFSPSSTLFSSSRLRYGMSDVMPSGRSRLLEDFRNNRYPNLQLREIAGHIMEFSQDQHGSRFIQLKLERATPAERQLVFNEILQAAYQLMVDVFGNYVIQKFFEFGSLEQKLALAERIRGHVLSLALQMYGCRVIQKALEFIPSDQQNEMVRELDGHVLKCVKDQNGNHVVQKCIECVQPQSLQFIIDAFKGQVFALSTHPYGCRVIQRILEHCLPDQTLPILEELHQHTEQLVQDQYGNYVIQHVLEHGRPEDKSKIVAEIRGNVLVLSQHKFASNVVEKCVTHASRTERAVLIDEVCTMNDGPHSALYTMMKDQYANYVVQKMIDVAEPGQRKIVMHKIRPHIATLRKYTYGKHILAKLEKYYMKNGVDLGPICGPPNGII

SEQ ID NO: 98 - protein, 878 aa, Homo sapiens
MIFKHLLWREERWESRTPGNCQNSANEVDLLGPNQNGSEGLAQLTSTNGAKPVEDFSNMESQSVPLDPMEHVGMEPLQFDYSGTQVPVDSAAATVGLFDYNSQQQLFQRPNALAVQQLTAAQQQQYALAAAHQPHIGLAPAAFVPNPYIISAAPPGTDPYTAGLAAAATLGPAVVPHQYYGVTPWGVYPASLFQQQAAAAAAATNSANQQTTPQAQQGQQQVLRGGASQRPLTPNQNQQGQQTDPLVAAAAVNSALAFGQGLAAGMPGYPVLAPAAYYDQTGALVVNAGARNGLGAPVRLVAPAPVIISSSAAQAGTQQPQPQPQQQPNNNLASSSFYGNNSLNSNSQSSSLFSQGSAQPANTSLGFGSSSSLGATLGSALGGFGTAVANSNTGSGSRRDSLTGSSDLYKRTSSSLTPIGHSFYNGLSFSSSPGPVGMPLPSQGPGHSQTPPPSLSSHGSSSSLNLGGLTNGSGRYISAAPGAEAKYRSASSASSLFSPSSTLFSSSRLRYGMSDVMPSGRSRLLEDFRNNRYPNLQLREIAGHIMEFSQDQHGSRFIQLKLERATPAERQLVFNEILQAAYQLMVDVFGNYVIQKFFEFGSLEQKLALAERIRGHVLSLALQMYGCRVIQKALEFIPSDQQNEMVRELDGHVLKCVKDQNGNHVVQKCIECVQPQSLQFIIDAFKGQVFALSTHPYGCRVIQRILEHCLPDQTLPILEELHQHTEQLVQDQYGNYVIQHVLEHGRPEDKSKIVAEIRGNVLVLSQHKFASNVVEKCVTHASRTERAVLIDEVCTMNDGPHSALYTMMKDQYANYVVQKMIDVAEPGQRKIVMHKIRPHIATLRKYTYGKHILAKLEKYYMKNGVDLGPICGPPNGII

SEQ ID NO: 99 - protein, 1040 aa, Homo sapiens
MSVACVLKRKAVLWQDSFSPHLKHHPQEPANPNMPVVLTSGTGSQAQPQPAANQALAAGTHSSPVPGSIGVAGRSQDDAMVDYFFQRQHGEQLGGGGSGGGGYNNSKHRWPTGDNIHAEHQVRSMDELNHDFQALALEGRAMGEQLLPGKKFWETDESSKDGPKGIFLGDQWRDSAWGTSDHSVSQPIMVQRRPGQSFHVNSEVNSVLSPRSESGGLGVSMVEYVLSSSPGDSCLRKGGFLFQRPNALAVQQLTAAQQQQYALAAAHQPHIGLAPAAFVPNPYIISAAPPGTDPYTAGLAAAATLGPAVVPHQYYGVTPWGVYPASLFQQQAAAAAAATNSANQQTTPQAQQGQQQVLRGGASQRPLTPNQNQQGQQTDPLVAAAAVNSALAFGQGLAAGMPGYPVLAPAAYYDQTGALVVNAGARNGLGAPVRLVAPAPVIISSSAAQAAVAAAAASANGAAGGLAGTTNGPFRPLGTQQPQPQPQQQPNNNLASSSFYGNNSLNSNSQSSSLFSQGSAQPANTSLGFGSSSSLGATLGSALGGFGTAVANSNTGSGSRRDSLTGSSDLYKRTSSSLTPIGHSFYNGLSFSSSPGPVGMPLPSQGPGHSQTPPPSLSSHGSSSSLNLGGLTNGSGRYISAAPGAEAKYRSASSASSLFSPSSTLFSSSRLRYGMSDVMPSGRSRLLEDFRNNRYPNLQLREIAGHIMEFSQDQHGSRFIQLKLERATPAERQLVFNEILQAAYQLMVDVFGNYVIQKFFEFGSLEQKLALAERIRGHVLSLALQMYGCRVIQKALEFIPSDQQNEMVRELDGHVLKCVKDQNGNHVVQKCIECVQPQSLQFIIDAFKGQVFALSTHPYGCRVIQRILEHCLPDQTLPILEELHQHTEQLVQDQYGNYVIQHVLEHGRPEDKSKIVAEIRGNVLVLSQHKFASNVVEKCVTHASRTERAVLIDEVCTMNDGPHSALYTMMKDQYANYVVQKMIDVAEPGQRKIVMHKIRPHIATLRKYTYGKHILAKLEKYYMKNGVDLGPICGPPNGII

SEQ ID NO: 100 - protein, 844 aa, Homo sapiens
MIFKHLLWREERWESRTPGNCQNSANEVDLLGPNQNGSEGLAQLTSTNGAKPVEDFSNMESQSVPLDPMEHVGMEPLQFDYSGTQVPVDSAAATVGLFDYNSQQQLFQRPNALAVQQLTAAQQQQYALAAAHQPHIGPAVVPHQYYGVTPWGVYPASLFQQQAAAAAAATNSANQQTTPQAQQGQQQVLRGGASQRPLTPNQNQQGQQTDPLVAAAAVNSALAFGQGLAAGMPGYPVLAPAAYYDQTGALVVNAGARNGLGAPVRLVAPAPVIISSSAAQAGTQQPQPQPQQQPNNNLASSSFYGNNSLNSNSQSSSLFSQGSAQPANTSLGFGSSSSLGATLGSALGGFGTAVANSNTGSGSRRDSLTGSSDLYKRTSSSLTPIGHSFYNGLSFSSSPGPVGMPLPSQGPGHSQTPPPSLSSHGSSSSLNLGGLTNGSGRYISAAPGAEAKYRSASSASSLFSPSSTLFSSSRLRYGMSDVMPSGRSRLLEDFRNNRYPNLQLREIAGHIMEFSQDQHGSRFIQLKLERATPAERQLVFNEILQAAYQLMVDVFGNYVIQKFFEFGSLEQKLALAERIRGHVLSLALQMYGCRVIQKALEFIPSDQQNEMVRELDGHVLKCVKDQNGNHVVQKCIECVQPQSLQFIIDAFKGQVFALSTHPYGCRVIQRILEHCLPDQTLPILEELHQHTEQLVQDQYGNYVIQHVLEHGRPEDKSKIVAEIRGNVLVLSQHKFASNVVEKCVTHASRTERAVLIDEVCTMNDGPHSALYTMMKDQYANYVVQKMIDVAEPGQRKIVMHKIRPHIATLRKYTYGKHILAKLEKYYMKNGVDLGPICGPPNGII

SEQ ID NO: 101 - protein, 905 aa, Homo sapiens
MIFKHLLWREERWESRTPGNCQNSANEVDLLGPNQNGSEGLAQLTSTNGAKPVEDFSNMESQSVPLDPMEHVGMEPLQFDYSGTQVPVDSAAATVGLFDYNSQQQLFQRPNALAVQQLTAAQQQQYALAAAHQPHIGLAPAAFVPNPYIISAAPPGTDPYTAGLAAAATLGPAVVPHQYYGVTPWGVYPASLFQQQAAAAAAATNSANQQTTPQAQQGQQQVLRGGASQRPLTPNQNQQGQQTDPLVAAAAVNSALAFGQGLAAGMPGYPVLAPAAYYDQTGALVVNAGARNGLGAPVRLVAPAPVIISSSAAQAAVAAAAASANGAAGGLAGTTNGPFRPLGTQQPQPQPQQQPNNNLASSSFYGNNSLNSNSQSSSLFSQGSAQPANTSLGFGSSSSLGATLGSALGGFGTAVANSNTGSGSRRDSLTGSSDLYKRTSSSLTPIGHSFYNGLSFSSSPGPVGMPLPSQGPGHSQTPPPSLSSHGSSSSLNLGGLTNGSGRYISAAPGAEAKYRSASSASSLFSPSSTLFSSSRLRYGMSDVMPSGRSRLLEDFRNNRYPNLQLREIAGHIMEFSQDQHGSRFIQLKLERATPAERQLVFNEILQAAYQLMVDVFGNYVIQKFFEFGSLEQKLALAERIRGHVLSLALQMYGCRVIQKALEFIPSDQQNEMVRELDGHVLKCVKDQNGNHVVQKCIECVQPQSLQFIIDAFKGQVFALSTHPYGCRVIQRILEHCLPDQTLPILEELHQHTEQLVQDQYGNYVIQHVLEHGRPEDKSKIVAEIRGNVLVLSQHKFASNVVEKCVTHASRTERAVLIDEVCTMNDGPHSALYTMMKDQYANYVVQKMIDVAEPGQRKIVMHKIRPHIATLRKYTYGKHILAKLEKYYMKNGVDLGPICGPPNGII

SEQ ID NO: 102 - protein, 1090 aa, Homo sapiens
MSVACVLKRKAVLWQDSFSPHLKHHPQEPANPNMPVVLTSGTGSQAQPQPAANQALAAGTHSSPVPGSIGVAGRSQDDAMVDYFFQRQHGEQLGGGGSGGGGYNNSKHRWPTGDNIHAEHQVRSMDELNHDFQALALEGRAMGEGPRDADSDENDKGEKKNKGTFDGDKLGDLKEEGDVMDKTNGLPVQNGIDADVKDFSRTPGNCQNSANEVDLLGPNQNGSEGLAQLTSTNGAKPVEDFSNMESQSVPLDPMEHVGMEPLQFDYSGTQVPVDSAAATVGLFDYNSQQQLFQRPNALAVQQLTAAQQQQYALAAAHQPHIGLAPAAFVPNPYIISAAPPGTDPYTAGLAAAATLGPAVVPHQYYGVTPWGVYPASLFQQQAAAAAAATNSANQQTTPQAQQGQQQVLRGGASQRPLTPNQNQQGQQTDPLVAAAAVNSALAFGQGLAAGMPGYPVLAPAAYYDQTGALVVNAGARNGLGAPVRLVAPAPVIISSSAAQAAVAAAAASANGAAGGLAGTTNGPFRPLGTQQPQPQPQQQPNNNLASSSFYGNNSLNSNSQSSSLFSQGSAQPANTSLGFGSSSSLGATLGSALGGFGTAVANSNTGSGSRRDSLTGSSDLYKRTSSSLTPIGHSFYNGLSFSSSPGPVGMPLPSQGPGHSQTPPPSLSSHGSSSSLNLGGLTNGSGRYISAAPGAEAKYRSASSASSLFSPSSTLFSSSRLRYGMSDVMPSGRSRLLEDFRNNRYPNLQLREIAGHIMEFSQDQHGSRFIQLKLERATPAERQLVFNEILQAAYQLMVDVFGNYVIQKFFEFGSLEQKLALAERIRGHVLSLALQMYGCRVIQKALEFIPSDQQNEMVRELDGHVLKCVKDQNGNHVVQKCIECVQPQSLQFIIDAFKGQVFALSTHPYGCRVIQRILEHCLPDQTLPILEELHQHTEQLVQDQYGNYVIQHVLEHGRPEDKSKIVAEIRGNVLVLSQHKFASNVVEKCVTHASRTERAVLIDEVCTMNDGPHSALYTMMKDQYANYVVQKMIDVAEPGQRKIVMHKIRPHIATLRKYTYGKHILAKLEKYYMKNGVDLGPICGPPNGII

SEQ ID NO: 103 - protein, 1113 aa, Homo sapiens
MSVACVLKRKAVLWQDSFSPHLKHHPQEPANPNMPVVLTSGTGSQAQPQPAANQALAAGTHSSPVPGSIGVAGRSQDDAMVDYFFQRQHGEQLGGGGSGGGGYNNSKHRWPTGDNIHAEHQVRSMDELNHDFQALALEGRAMGEGPRDADSDENDKGEKKNKGTFDGDKLGDLKEEGDVMDKTNGLPVQNGIDADVKDFSRTPGNCQNSANEVDLLGPNQNGSEGLAQLTSTNGAKPVEDFSNMESQSVPLDPMEHVGMEPLQFDYSGTQVPVDSAAATVGLFDYNSQQQLFQRPNALAVQQLTAAQQQQYALAAAHQPHIGLAPAAFVPNPYIISAAPPGTDPYTAGLAAAATLGPAVVPHQYYGVTPWGVYPASLFQQQAAAAAAATNSANQQTTPQAQQGQQQVLRGGASQRPLTPNQNQQGQQTDPLVAAAAVNSALAFGQGLAAGMPGYPVLAPAAYYDQTGALVVNAGARNGLGAPVRLVAPAPVIISSSAAQAGERTSEWTPARDLKVATDSEILKTVAAAAASANGAAGGLAGTTNGPFRPLGTQQPQPQPQQQPNNNLASSSFYGNNSLNSNSQSSSLFSQGSAQPANTSLGFGSSSSLGATLGSALGGFGTAVANSNTGSGSRRDSLTGSSDLYKRTSSSLTPIGHSFYNGLSFSSSPGPVGMPLPSQGPGHSQTPPPSLSSHGSSSSLNLGGLTNGSGRYISAAPGAEAKYRSASSASSLFSPSSTLFSSSRLRYGMSDVMPSGRSRLLEDFRNNRYPNLQLREIAGHIMEFSQDQHGSRFIQLKLERATPAERQLVFNEILQAAYQLMVDVFGNYVIQKFFEFGSLEQKLALAERIRGHVLSLALQMYGCRVIQKALEFIPSDQQNEMVRELDGHVLKCVKDQNGNHVVQKCIECVQPQSLQFIIDAFKGQVFALSTHPYGCRVIQRILEHCLPDQTLPILEELHQHTEQLVQDQYGNYVIQHVLEHGRPEDKSKIVAEIRGNVLVLSQHKFASNVVEKCVTHASRTERAVLIDEVCTMNDGPHSALYTMMKDQYANYVVQKMIDVAEPGQRKIVMHKIRPHIATLRKYTYGKHILAKLEKYYMKNGVDLGPICGPPNGII

SEQ ID NO: 104 - protein, 163 aa, Homo sapiens
MAVILGIFGTVQYRSRYLILYAAWLVLWVGWNAFIICFYLEVGQLSQDRDFIMTFNTSLHRSWWMENGPGCLVTPVLNSRLALEDHHVISVTGCLLDYPYIEALSSALQIFLALFGFVFACYVSKVFLEEEDSFDFIGGFDSYGYQAPQKTSHLQLQPLYTSG

SEQ ID NO: 105 - protein, 1063 aa, Homo sapiens
MSVACVLKRKAVLWQDSFSPHLKHHPQEPANPNMPVVLTSGTGSQAQPQPAANQALAAGTHSSPVPGSIGVAGRSQDDAMVDYFFQRQHGEQLGGGGSGGGGYNNSKHRWPTGDNIHAEHQVRSMDELNHDFQALALEGRAMGEGPRDADSDENDKGEKKNKGTFDGDKLGDLKEEGDVMDKTNGLPVQNGIDADVKDFSRTPGNCQNSANEVDLLGPNQNGSEGLAQLTSTNGAKPVEDFSNMESQSVPLDPMEHVGMEPLQFDYSGTQVPVDSAAATVGLFDYNSQQQLFQRPNALAVQQLTAAQQQQYALAAAHQPHIGLAPAAFVPNPYIISAAPPGTDPYTAGLAAAATLGPAVVPHQYYGVTPWGVYPASLFQQQAAAAAAATNSANQQTTPQAQQGQQQVLRGGASQRPLTPNQNQQGQQTDPLVAAAAVNSALAFGQGLAAGMPGYPVLAPAAYYDQTGALVVNAGARNGLGAPVRLVAPAPVIISSSAAQAGTQQPQPQPQQQPNNNLASSSFYGNNSLNSNSQSSSLFSQGSAQPANTSLGFGSSSSLGATLGSALGGFGTAVANSNTGSGSRRDSLTGSSDLYKRTSSSLTPIGHSFYNGLSFSSSPGPVGMPLPSQGPGHSQTPPPSLSSHGSSSSLNLGGLTNGSGRYISAAPGAEAKYRSASSASSLFSPSSTLFSSSRLRYGMSDVMPSGRSRLLEDFRNNRYPNLQLREIAGHIMEFSQDQHGSRFIQLKLERATPAERQLVFNEILQAAYQLMVDVFGNYVIQKFFEFGSLEQKLALAERIRGHVLSLALQMYGCRVIQKALEFIPSDQQNEMVRELDGHVLKCVKDQNGNHVVQKCIECVQPQSLQFIIDAFKGQVFALSTHPYGCRVIQRILEHCLPDQTLPILEELHQHTEQLVQDQYGNYVIQHVLEHGRPEDKSKIVAEIRGNVLVLSQHKFASNVVEKCVTHASRTERAVLIDEVCTMNDGPHSALYTMMKDQYANYVVQKMIDVAEPGQRKIVMHKIRPHIATLRKYTYGKHILAKLEKYYMKNGVDLGPICGPPNGII

SEQ ID NO: 106 - protein, 1066 aa, Homo sapiens
MVRSMDELNHDFQALALEGRAMGEQLLPGKKFWETDESSKDGPKGIFLGDQWRDSAWGTSDHSVSQPIMVQRRPGQSFHVNSEVNSVLSPRSESGGLGVSMVEYVLSSSPGDSCLRKGGFGPRDADSDENDKGEKKNKGTFDGDKLGDLKEEGDVMDKTNGLPVQNGIDADVKDFSRTPGNCQNSANEVDLLGPNQNGSEGLAQLTSTNGAKPVEDFSNMESQSVPLDPMEHVGMEPLQFDYSGTQVPVDSAAATVGLFDYNSQQQLFQRPNALAVQQLTAAQQQQYALAAAHQPHIGLAPAAFVPNPYIISAAPPGTDPYTAGLAAAATLGPAVVPHQYYGVTPWGVYPASLFQQQAAAAAAATNSANQQTTPQAQQGQQQVLRGGASQRPLTPNQNQQGQQTDPLVAAAAVNSALAFGQGLAAGMPGYPVLAPAAYYDQTGALVVNAGARNGLGAPVRLVAPAPVIISSSAAQAAVAAAAASANGAAGGLAGTTNGPFRPLGTQQPQPQPQQQPNNNLASSSFYGNNSLNSNSQSSSLFSQGSAQPANTSLGFGSSSSLGATLGSALGGFGTAVANSNTGSGSRRDSLTGSSDLYKRTSSSLTPIGHSFYNGLSFSSSPGPVGMPLPSQGPGHSQTPPPSLSSHGSSSSLNLGGLTNGSGRYISAAPGAEAKYRSASSASSLFSPSSTLFSSSRLRYGMSDVMPSGRSRLLEDFRNNRYPNLQLREIAGHIMEFSQDQHGSRFIQLKLERATPAERQLVFNEILQAAYQLMVDVFGNYVIQKFFEFGSLEQKLALAERIRGHVLSLALQMYGCRVIQKALEFIPSDQQNEMVRELDGHVLKCVKDQNGNHVVQKCIECVQPQSLQFIIDAFKGQVFALSTHPYGCRVIQRILEHCLPDQTLPILEELHQHTEQLVQDQYGNYVIQHVLEHGRPEDKSKIVAEIRGNVLVLSQHKFASNVVEKCVTHASRTERAVLIDEVCTMNDGPHSALYTMMKDQYANYVVQKMIDVAEPGQRKIVMHKIRPHIATLRKYTYGKHILAKLEKYYMKNGVDLGPICGPPNGII

SEQ ID NO: 107 - protein, 1029 aa, Homo sapiens
MSVACVLKRKAVLWQDSFSPHLKHHPQEPANPNMPVVLTSGTGSQAQPQPAANQALAAGTHSSPVPGSIGVAGRSQDDAMVDYFFQRQHGEQLGGGGSGGGGYNNSKHRWPTGDNIHAEHQVRSMDELNHDFQALALEGRAMGEGPRDADSDENDKGEKKNKGTFDGDKLGDLKEEGDVMDKTNGLPVQNGIDADVKDFSRTPGNCQNSANEVDLLGPNQNGSEGLAQLTSTNGAKPVEDFSNMESQSVPLDPMEHVGMEPLQFDYSGTQVPVDSAAATVGLFDYNSQQQLFQRPNALAVQQLTAAQQQQYALAAAHQPHIGPAVVPHQYYGVTPWGVYPASLFQQQAAAAAAATNSANQQTTPQAQQGQQQVLRGGASQRPLTPNQNQQGQQTDPLVAAAAVNSALAFGQGLAAGMPGYPVLAPAAYYDQTGALVVNAGARNGLGAPVRLVAPAPVIISSSAAQAGTQQPQPQPQQQPNNNLASSSFYGNNSLNSNSQSSSLFSQGSAQPANTSLGFGSSSSLGATLGSALGGFGTAVANSNTGSGSRRDSLTGSSDLYKRTSSSLTPIGHSFYNGLSFSSSPGPVGMPLPSQGPGHSQTPPPSLSSHGSSSSLNLGGLTNGSGRYISAAPGAEAKYRSASSASSLFSPSSTLFSSSRLRYGMSDVMPSGRSRLLEDFRNNRYPNLQLREIAGHIMEFSQDQHGSRFIQLKLERATPAERQLVFNEILQAAYQLMVDVFGNYVIQKFFEFGSLEQKLALAERIRGHVLSLALQMYGCRVIQKALEFIPSDQQNEMVRELDGHVLKCVKDQNGNHVVQKCIECVQPQSLQFIIDAFKGQVFALSTHPYGCRVIQRILEHCLPDQTLPILEELHQHTEQLVQDQYGNYVIQHVLEHGRPEDKSKIVAEIRGNVLVLSQHKFASNVVEKCVTHASRTERAVLIDEVCTMNDGPHSALYTMMKDQYANYVVQKMIDVAEPGQRKIVMHKIRPHIATLRKYTYGKHILAKLEKYYMKNGVDLGPICGPPNGII

SEQ ID NO: 108 - protein, 1005 aa, Homo sapiens
MVRSMDELNHDFQALALEGRAMGEQLLPGKKFWETDESSKDGPKGIFLGDQWRDSAWGTSDHSVSQPIMVQRRPGQSFHVNSEVNSVLSPRSESGGLGVSMVEYVLSSSPGDSCLRKGGFGPRDADSDENDKGEKKNKGTFDGDKLGDLKEEGDVMDKTNGLPVQNGIDADVKDFSRTPGNCQNSANEVDLLGPNQNGSEGLAQLTSTNGAKPVEDFSNMESQSVPLDPMEHVGMEPLQFDYSGTQVPVDSAAATVGLFDYNSQQQLFQRPNALAVQQLTAAQQQQYALAAAHQPHIGPAVVPHQYYGVTPWGVYPASLFQQQAAAAAAATNSANQQTTPQAQQGQQQVLRGGASQRPLTPNQNQQGQQTDPLVAAAAVNSALAFGQGLAAGMPGYPVLAPAAYYDQTGALVVNAGARNGLGAPVRLVAPAPVIISSSAAQAGTQQPQPQPQQQPNNNLASSSFYGNNSLNSNSQSSSLFSQGSAQPANTSLGFGSSSSLGATLGSALGGFGTAVANSNTGSGSRRDSLTGSSDLYKRTSSSLTPIGHSFYNGLSFSSSPGPVGMPLPSQGPGHSQTPPPSLSSHGSSSSLNLGGLTNGSGRYISAAPGAEAKYRSASSASSLFSPSSTLFSSSRLRYGMSDVMPSGRSRLLEDFRNNRYPNLQLREIAGHIMEFSQDQHGSRFIQLKLERATPAERQLVFNEILQAAYQLMVDVFGNYVIQKFFEFGSLEQKLALAERIRGHVLSLALQMYGCRVIQKALEFIPSDQQNEMVRELDGHVLKCVKDQNGNHVVQKCIECVQPQSLQFIIDAFKGQVFALSTHPYGCRVIQRILEHCLPDQTLPILEELHQHTEQLVQDQYGNYVIQHVLEHGRPEDKSKIVAEIRGNVLVLSQHKFASNVVEKCVTHASRTERAVLIDEVCTMNDGPHSALYTMMKDQYANYVVQKMIDVAEPGQRKIVMHKIRPHIATLRKYTYGKHILAKLEKYYMKNGVDLGPICGPPNGII

SEQ ID NO: 109 - protein, 1089 aa, Homo sapiens
MVRSMDELNHDFQALALEGRAMGEQLLPGKKFWETDESSKDGPKGIFLGDQWRDSAWGTSDHSVSQPIMVQRRPGQSFHVNSEVNSVLSPRSESGGLGVSMVEYVLSSSPGDSCLRKGGFGPRDADSDENDKGEKKNKGTFDGDKLGDLKEEGDVMDKTNGLPVQNGIDADVKDFSRTPGNCQNSANEVDLLGPNQNGSEGLAQLTSTNGAKPVEDFSNMESQSVPLDPMEHVGMEPLQFDYSGTQVPVDSAAATVGLFDYNSQQQLFQRPNALAVQQLTAAQQQQYALAAAHQPHIGLAPAAFVPNPYIISAAPPGTDPYTAGLAAAATLGPAVVPHQYYGVTPWGVYPASLFQQQAAAAAAATNSANQQTTPQAQQGQQQVLRGGASQRPLTPNQNQQGQQTDPLVAAAAVNSALAFGQGLAAGMPGYPVLAPAAYYDQTGALVVNAGARNGLGAPVRLVAPAPVIISSSAAQAGERTSEWTPARDLKVATDSEILKTVAAAAASANGAAGGLAGTTNGPFRPLGTQQPQPQPQQQPNNNLASSSFYGNNSLNSNSQSSSLFSQGSAQPANTSLGFGSSSSLGATLGSALGGFGTAVANSNTGSGSRRDSLTGSSDLYKRTSSSLTPIGHSFYNGLSFSSSPGPVGMPLPSQGPGHSQTPPPSLSSHGSSSSLNLGGLTNGSGRYISAAPGAEAKYRSASSASSLFSPSSTLFSSSRLRYGMSDVMPSGRSRLLEDFRNNRYPNLQLREIAGHIMEFSQDQHGSRFIQLKLERATPAERQLVFNEILQAAYQLMVDVFGNYVIQKFFEFGSLEQKLALAERIRGHVLSLALQMYGCRVIQKALEFIPSDQQNEMVRELDGHVLKCVKDQNGNHVVQKCIECVQPQSLQFIIDAFKGQVFALSTHPYGCRVIQRILEHCLPDQTLPILEELHQHTEQLVQDQYGNYVIQHVLEHGRPEDKSKIVAEIRGNVLVLSQHKFASNVVEKCVTHASRTERAVLIDEVCTMNDGPHSALYTMMKDQYANYVVQKMIDVAEPGQRKIVMHKIRPHIATLRKYTYGKHILAKLEKYYMKNGVDLGPICGPPNGII
